United States Patent Application Publication US 2017/0175128 A1 - sequence listing, part 3

SEQ ID NO: 47691 - RNA, 24 nt, Artificial Sequence
  Synthetic oligonucleotide: CTLA4-2334
auggaaaauguauucaauuugaaa

SEQ ID NO: 47692 - RNA, 18 nt, Artificial Sequence
  Synthetic oligonucleotide: CTLA4-2335
aaaaucacaagaaauaaa

SEQ ID NO: 47693 - RNA, 19 nt, Artificial Sequence
  Synthetic oligonucleotide: CTLA4-2336
uaaaaucacaagaaauaaa

SEQ ID NO: 47694 - RNA, 20 nt, Artificial Sequence
  Synthetic oligonucleotide: CTLA4-1245
cuaaaaucacaagaaauaaa

SEQ ID NO: 47695 - RNA, 21 nt, Artificial Sequence
  Synthetic oligonucleotide: CTLA4-2337
acuaaaaucacaagaaauaaa

SEQ ID NO: 47696 - RNA, 22 nt, Artificial Sequence
  Synthetic oligonucleotide: CTLA4-2338
aacuaaaaucacaagaaauaaa

SEQ ID NO: 47697 - RNA, 23 nt, Artificial Sequence
  Synthetic oligonucleotide: CTLA4-2339
aaacuaaaaucacaagaaauaaa

SEQ ID NO: 47698 - RNA, 24 nt, Artificial Sequence
  Synthetic oligonucleotide: CTLA4-2340
aaaacuaaaaucacaagaaauaaa

SEQ ID NO: 47699 - RNA, 18 nt, Artificial Sequence
  Synthetic oligonucleotide: CTLA4-2341
cuuugacugcugaaacaa

SEQ ID NO: 47700 - RNA, 19 nt, Artificial Sequence
  Synthetic oligonucleotide: CTLA4-2342
ccuuugacugcugaaacaa

SEQ ID NO: 47701 - RNA, 20 nt, Artificial Sequence
  Synthetic oligonucleotide: CTLA4-1024
gccuuugacugcugaaacaa

SEQ ID NO: 47702 - RNA, 21 nt, Artificial Sequence
  Synthetic oligonucleotide: CTLA4-2343
ugccuuugacugcugaaacaa

SEQ ID NO: 47703 - RNA, 22 nt, Artificial Sequence
  Synthetic oligonucleotide: CTLA4-2344
cugccuuugacugcugaaacaa

SEQ ID NO: 47704 - RNA, 23 nt, Artificial Sequence
  Synthetic oligonucleotide: CTLA4-2345
acugccuuugacugcugaaacaa

SEQ ID NO: 47705 - RNA, 24 nt, Artificial Sequence
  Synthetic oligonucleotide: CTLA4-2346
cacugccuuugacugcugaaacaa

SEQ ID NO: 47706 - RNA, 18 nt, Artificial Sequence
  Synthetic oligonucleotide: CTLA4-2347
acaaccucaagcacucaa

SEQ ID NO: 47707 - RNA, 19 nt, Artificial Sequence
  Synthetic oligonucleotide: CTLA4-2348
gacaaccucaagcacucaa

SEQ ID NO: 47708 - RNA, 20 nt, Artificial Sequence
  Synthetic oligonucleotide: CTLA4-986
agacaaccucaagcacucaa

SEQ ID NO: 47709 - RNA, 21 nt, Artificial Sequence
  Synthetic oligonucleotide: CTLA4-2349
aagacaaccucaagcacucaa

SEQ ID NO: 47710 - RNA, 22 nt, Artificial Sequence
  Synthetic oligonucleotide: CTLA4-2350
aaagacaaccucaagcacucaa

SEQ ID NO: 47711 - RNA, 23 nt, Artificial Sequence
  Synthetic oligonucleotide: CTLA4-2351
aaaagacaaccucaagcacucaa

SEQ ID NO: 47712 - RNA, 24 nt, Artificial Sequence
  Synthetic oligonucleotide: CTLA4-2352
gaaaagacaaccucaagcacucaa

SEQ ID NO: 47713 - RNA, 18 nt, Artificial Sequence
  Synthetic oligonucleotide: CTLA4-2353
guuuugguuuuacgagaa

SEQ ID NO: 47714 - RNA, 19 nt, Artificial Sequence
  Synthetic oligonucleotide: CTLA4-2354
uguuuugguuuuacgagaa

SEQ ID NO: 47715 - RNA, 20 nt, Artificial Sequence
  Synthetic oligonucleotide: CTLA4-553
uuguuuugguuuuacgagaa

SEQ ID NO: 47716 - RNA, 21 nt, Artificial Sequence
  Synthetic oligonucleotide: CTLA4-2355
uuuguuuugguuuuacgagaa

SEQ ID NO: 47717 - RNA, 22 nt, Artificial Sequence
  Synthetic oligonucleotide: CTLA4-2356
uuuuguuuugguuuuacgagaa

SEQ ID NO: 47718 - RNA, 23 nt, Artificial Sequence
  Synthetic oligonucleotide: CTLA4-2357
uuuuuguuuugguuuuacgagaa

SEQ ID NO: 47719 - RNA, 24 nt, Artificial Sequence
  Synthetic oligonucleotide: CTLA4-2358
cuuuuuguuuugguuuuacgagaa

SEQ ID NO: 47720 - RNA, 18 nt, Artificial Sequence
  Synthetic oligonucleotide: CTLA4-1486
gcagaagacagggaugaa

SEQ ID NO: 47721 - RNA, 19 nt, Artificial Sequence
  Synthetic oligonucleotide: CTLA4-1487
ugcagaagacagggaugaa

SEQ ID NO: 47722 - RNA, 20 nt, Artificial Sequence
  Synthetic oligonucleotide: CTLA4-286
uugcagaagacagggaugaa

SEQ ID NO: 47723 - RNA, 21 nt, Artificial Sequence
  Synthetic oligonucleotide: CTLA4-1488
uuugcagaagacagggaugaa

SEQ ID NO: 47724 - RNA, 22 nt, Artificial Sequence
  Synthetic oligonucleotide: CTLA4-1489
cuuugcagaagacagggaugaa

SEQ ID NO: 47725 - RNA, 23 nt, Artificial Sequence
  Synthetic oligonucleotide: CTLA4-1490
ccuuugcagaagacagggaugaa

SEQ ID NO: 47726 - RNA, 24 nt, Artificial Sequence
  Synthetic oligonucleotide: CTLA4-1491
accuuugcagaagacagggaugaa

SEQ ID NO: 47727 - RNA, 18 nt, Artificial Sequence
  Synthetic oligonucleotide: CTLA4-2359
acacagaaggcacuugaa

SEQ ID NO: 47728 - RNA, 19 nt, Artificial Sequence
  Synthetic oligonucleotide: CTLA4-2360
cacacagaaggcacuugaa

SEQ ID NO: 47729 - RNA, 20 nt, Artificial Sequence
  Synthetic oligonucleotide: CTLA4-993
acacacagaaggcacuugaa

SEQ ID NO: 47730 - RNA, 21 nt, Artificial Sequence
  Synthetic oligonucleotide: CTLA4-2361
cacacacagaaggcacuugaa

SEQ ID NO: 47731 - RNA, 22 nt, Artificial Sequence
  Synthetic oligonucleotide: CTLA4-2362
gcacacacagaaggcacuugaa

SEQ ID NO: 47732 - RNA, 23 nt, Artificial Sequence
  Synthetic oligonucleotide: CTLA4-2363
ugcacacacagaaggcacuugaa

SEQ ID NO: 47733 - RNA, 24 nt, Artificial Sequence
  Synthetic oligonucleotide: CTLA4-2364
gugcacacacagaaggcacuugaa

SEQ ID NO: 47734 - RNA, 18 nt, Artificial Sequence
  Synthetic oligonucleotide: CTLA4-2365
gaggaucuggauaacuaa

SEQ ID NO: 47735 - RNA, 19 nt, Artificial Sequence
  Synthetic oligonucleotide: CTLA4-2366
ugaggaucuggauaacuaa

SEQ ID NO: 47736 - RNA, 20 nt, Artificial Sequence
  Synthetic oligonucleotide: CTLA4-977
uugaggaucuggauaacuaa

SEQ ID NO: 47737 - RNA, 21 nt, Artificial Sequence
  Synthetic oligonucleotide: CTLA4-2367
uuugaggaucuggauaacuaa

SEQ ID NO: 47738 - RNA, 22 nt, Artificial Sequence
  Synthetic oligonucleotide: CTLA4-2368
cuuugaggaucuggauaacuaa

SEQ ID NO: 47739 - RNA, 23 nt, Artificial Sequence
  Synthetic oligonucleotide: CTLA4-2369
acuuugaggaucuggauaacuaa

SEQ ID NO: 47740 - RNA, 24 nt, Artificial Sequence
  Synthetic oligonucleotide: CTLA4-2370
cacuuugaggaucuggauaacuaa

SEQ ID NO: 47741 - RNA, 18 nt, Artificial Sequence
  Synthetic oligonucleotide: CTLA4-2371
cauuuagcauuugguuaa

SEQ ID NO: 47742 - RNA, 19 nt, Artificial Sequence
  Synthetic oligonucleotide: CTLA4-2372
ccauuuagcauuugguuaa

SEQ ID NO: 47743 - RNA, 20 nt, Artificial Sequence
  Synthetic oligonucleotide: CTLA4-1247
uccauuuagcauuugguuaa

SEQ ID NO: 47744 - RNA, 21 nt, Artificial Sequence
  Synthetic oligonucleotide: CTLA4-2373
auccauuuagcauuugguuaa

SEQ ID NO: 47745 - RNA, 22 nt, Artificial Sequence
  Synthetic oligonucleotide: CTLA4-2374
aauccauuuagcauuugguuaa

SEQ ID NO: 47746 - RNA, 23 nt, Artificial Sequence
  Synthetic oligonucleotide: CTLA4-2375
aaauccauuuagcauuugguuaa

SEQ ID NO: 47747 - RNA, 24 nt, Artificial Sequence
  Synthetic oligonucleotide: CTLA4-2376
uaaauccauuuagcauuugguuaa

SEQ ID NO: 47748 - RNA, 18 nt, Artificial Sequence
  Synthetic oligonucleotide: CTLA4-2377
auuacacaugugcacaca

SEQ ID NO: 47749 - RNA, 19 nt, Artificial Sequence
  Synthetic oligonucleotide: CTLA4-2378
uauuacacaugugcacaca

SEQ ID NO: 47750 - RNA, 20 nt, Artificial Sequence
  Synthetic oligonucleotide: CTLA4-995
guauuacacaugugcacaca

SEQ ID NO: 47751 - RNA, 21 nt, Artificial Sequence
  Synthetic oligonucleotide: CTLA4-2379
uguauuacacaugugcacaca

SEQ ID NO: 47752 - RNA, 22 nt, Artificial Sequence
  Synthetic oligonucleotide: CTLA4-2380
auguauuacacaugugcacaca

SEQ ID NO: 47753 - RNA, 23 nt, Artificial Sequence
  Synthetic oligonucleotide: CTLA4-2381
uauguauuacacaugugcacaca

SEQ ID NO: 47754 - RNA, 24 nt, Artificial Sequence
  Synthetic oligonucleotide: CTLA4-2382
auauguauuacacaugugcacaca

SEQ ID NO: 47755 - RNA, 18 nt, Artificial Sequence
  Synthetic oligonucleotide: CTLA4-1510
acucaccuuugcagaaga

SEQ ID NO: 47756 - RNA, 19 nt, Artificial Sequence
  Synthetic oligonucleotide: CTLA4-1511
cacucaccuuugcagaaga

SEQ ID NO: 47757 - RNA, 20 nt, Artificial Sequence
  Synthetic oligonucleotide: CTLA4-290
ucacucaccuuugcagaaga

SEQ ID NO: 47758 - RNA, 21 nt, Artificial Sequence
  Synthetic oligonucleotide: CTLA4-1512
cucacucaccuuugcagaaga

SEQ ID NO: 47759 - RNA, 22 nt, Artificial Sequence
  Synthetic oligonucleotide: CTLA4-1513
ucucacucaccuuugcagaaga

SEQ ID NO: 47760 - RNA, 23 nt, Artificial Sequence
  Synthetic oligonucleotide: CTLA4-1514
gucucacucaccuuugcagaaga

SEQ ID NO: 47761 - RNA, 24 nt, Artificial Sequence
  Synthetic oligonucleotide: CTLA4-1515
agucucacucaccuuugcagaaga

SEQ ID NO: 47762 - RNA, 18 nt, Artificial Sequence
  Synthetic oligonucleotide: CTLA4-2383
agagccagccaagccaga

SEQ ID NO: 47763 - RNA, 19 nt, Artificial Sequence
  Synthetic oligonucleotide: CTLA4-2384
cagagccagccaagccaga

SEQ ID NO: 47764 - RNA, 20 nt, Artificial Sequence
  Synthetic oligonucleotide: CTLA4-1027
acagagccagccaagccaga

SEQ ID NO: 47765 - RNA, 21 nt, Artificial Sequence
  Synthetic oligonucleotide: CTLA4-2385
uacagagccagccaagccaga

SEQ ID NO: 47766 - RNA, 22 nt, Artificial Sequence
  Synthetic oligonucleotide: CTLA4-2386
auacagagccagccaagccaga

SEQ ID NO: 47767 - RNA, 23 nt, Artificial Sequence
  Synthetic oligonucleotide: CTLA4-2387
aauacagagccagccaagccaga

SEQ ID NO: 47768 - RNA, 24 nt, Artificial Sequence
  Synthetic oligonucleotide: CTLA4-2388
gaauacagagccagccaagccaga

SEQ ID NO: 47769 - RNA, 18 nt, Artificial Sequence
  Synthetic oligonucleotide: CTLA4-2389
uguuuugguuuuacgaga

SEQ ID NO: 47770 - RNA, 19 nt, Artificial Sequence
  Synthetic oligonucleotide: CTLA4-2390
uuguuuugguuuuacgaga

SEQ ID NO: 47771 - RNA, 20 nt, Artificial Sequence
  Synthetic oligonucleotide: CTLA4-990
uuuguuuugguuuuacgaga

SEQ ID NO: 47772 - RNA, 21 nt, Artificial Sequence
  Synthetic oligonucleotide: CTLA4-2391
uuuuguuuugguuuuacgaga

SEQ ID NO: 47773 - RNA, 22 nt, Artificial Sequence
  Synthetic oligonucleotide: CTLA4-2392
uuuuuguuuugguuuuacgaga

SEQ ID NO: 47774 - RNA, 23 nt, Artificial Sequence
  Synthetic oligonucleotide: CTLA4-2393
cuuuuuguuuugguuuuacgaga

SEQ ID NO: 47775 - RNA, 24 nt, Artificial Sequence
  Synthetic oligonucleotide: CTLA4-2394
ccuuuuuguuuugguuuuacgaga

SEQ ID NO: 47776 - RNA, 18 nt, Artificial Sequence
  Synthetic oligonucleotide: CTLA4-2395
aacaagccaauccaugga

SEQ ID NO: 47777 - RNA, 19 nt, Artificial Sequence
  Synthetic oligonucleotide: CTLA4-2396
aaacaagccaauccaugga

SEQ ID NO: 47778 - RNA, 20 nt, Artificial Sequence
  Synthetic oligonucleotide: CTLA4-557
aaaacaagccaauccaugga

SEQ ID NO: 47779 - RNA, 21 nt, Artificial Sequence
  Synthetic oligonucleotide: CTLA4-2397
caaaacaagccaauccaugga

SEQ ID NO: 47780 - RNA, 22 nt, Artificial Sequence
  Synthetic oligonucleotide: CTLA4-2398
acaaaacaagccaauccaugga

SEQ ID NO: 47781 - RNA, 23 nt, Artificial Sequence
  Synthetic oligonucleotide: CTLA4-2399
aacaaaacaagccaauccaugga

SEQ ID NO: 47782 - RNA, 24 nt, Artificial Sequence
  Synthetic oligonucleotide: CTLA4-2400
gaacaaaacaagccaauccaugga

SEQ ID NO: 47783 - RNA, 18 nt, Artificial Sequence
  Synthetic oligonucleotide: CTLA4-2401
ccugcuggcccuggaaua

SEQ ID NO: 47784 - RNA, 19 nt, Artificial Sequence
  Synthetic oligonucleotide: CTLA4-2402
cccugcuggcccuggaaua

SEQ ID NO: 47785 - RNA, 20 nt, Artificial Sequence
  Synthetic oligonucleotide: CTLA4-1028
ucccugcuggcccuggaaua

SEQ ID NO: 47786 - RNA, 21 nt, Artificial Sequence
  Synthetic oligonucleotide: CTLA4-2403
cucccugcuggcccuggaaua

SEQ ID NO: 47787 - RNA, 22 nt, Artificial Sequence
  Synthetic oligonucleotide: CTLA4-2404
gcucccugcuggcccuggaaua

SEQ ID NO: 47788 - RNA, 23 nt, Artificial Sequence
  Synthetic oligonucleotide: CTLA4-2405
ugcucccugcuggcccuggaaua

SEQ ID NO: 47789 - RNA, 24 nt, Artificial Sequence
  Synthetic oligonucleotide: CTLA4-2406
cugcucccugcuggcccuggaaua

SEQ ID NO: 47790 - RNA, 18 nt, Artificial Sequence
  Synthetic oligonucleotide: CTLA4-1522
aggcaagccauggcuuua

SEQ ID NO: 47791 - RNA, 19 nt, Artificial Sequence
  Synthetic oligonucleotide: CTLA4-1523
aaggcaagccauggcuuua

SEQ ID NO: 47792 - RNA, 20 nt, Artificial Sequence
  Synthetic oligonucleotide: CTLA4-69
caaggcaagccauggcuuua

SEQ ID NO: 47793 - RNA, 21 nt, Artificial Sequence
  Synthetic oligonucleotide: CTLA4-1524
ccaaggcaagccauggcuuua

SEQ ID NO: 47794 - RNA, 22 nt, Artificial Sequence
  Synthetic oligonucleotide: CTLA4-1525
uccaaggcaagccauggcuuua

SEQ ID NO: 47795 - RNA, 23 nt, Artificial Sequence
  Synthetic oligonucleotide: CTLA4-1526
auccaaggcaagccauggcuuua

SEQ ID NO: 47796 - RNA, 24 nt, Artificial Sequence
  Synthetic oligonucleotide: CTLA4-1527
aauccaaggcaagccauggcuuua

SEQ ID NO: 47797 - RNA, 18 nt, Artificial Sequence
  Synthetic oligonucleotide: CTLA4-1528
augaagagaagaaaaaac

SEQ ID NO: 47798 - RNA, 19 nt, Artificial Sequence
  Synthetic oligonucleotide: CTLA4-1529
gaugaagagaagaaaaaac

SEQ ID NO: 47799 - RNA, 20 nt, Artificial Sequence
  Synthetic oligonucleotide: CTLA4-61
ggaugaagagaagaaaaaac

SEQ ID NO: 47800 - RNA, 21 nt, Artificial Sequence
  Synthetic oligonucleotide: CTLA4-1530
gggaugaagagaagaaaaaac

SEQ ID NO: 47801 - RNA, 22 nt, Artificial Sequence
  Synthetic oligonucleotide: CTLA4-1531
agggaugaagagaagaaaaaac

SEQ ID NO: 47802 - RNA, 23 nt, Artificial Sequence
  Synthetic oligonucleotide: CTLA4-1532
cagggaugaagagaagaaaaaac

SEQ ID NO: 47803 - RNA, 24 nt, Artificial Sequence
  Synthetic oligonucleotide: CTLA4-1533
acagggaugaagagaagaaaaaac

SEQ ID NO: 47804 - RNA, 18 nt, Artificial Sequence
  Synthetic oligonucleotide: CTLA4-2407
gaaaaaaacuaaaaucac

SEQ ID NO: 47805 - RNA, 19 nt, Artificial Sequence
  Synthetic oligonucleotide: CTLA4-2408
agaaaaaaacuaaaaucac

SEQ ID NO: 47806 - RNA, 20 nt, Artificial Sequence
  Synthetic oligonucleotide: CTLA4-1246
gagaaaaaaacuaaaaucac

SEQ ID NO: 47807 - RNA, 21 nt, Artificial Sequence
  Synthetic oligonucleotide: CTLA4-2409
agagaaaaaaacuaaaaucac

SEQ ID NO: 47808 - RNA, 22 nt, Artificial Sequence
  Synthetic oligonucleotide: CTLA4-2410
aagagaaaaaaacuaaaaucac

SEQ ID NO: 47809 - RNA, 23 nt, Artificial Sequence
  Synthetic oligonucleotide: CTLA4-2411
uaagagaaaaaaacuaaaaucac

SEQ ID NO: 47810 - RNA, 24 nt, Artificial Sequence
  Synthetic oligonucleotide: CTLA4-2412
uuaagagaaaaaaacuaaaaucac

SEQ ID NO: 47811 - RNA, 18 nt, Artificial Sequence
  Synthetic oligonucleotide: CTLA4-2413
ggauaacuaaguggagac

SEQ ID NO: 47812 - RNA, 19 nt, Artificial Sequence
  Synthetic oligonucleotide: CTLA4-2414
uggauaacuaaguggagac

SEQ ID NO: 47813 - RNA, 20 nt, Artificial Sequence
  Synthetic oligonucleotide: CTLA4-975
cuggauaacuaaguggagac

SEQ ID NO: 47814 - RNA, 21 nt, Artificial Sequence
  Synthetic oligonucleotide: CTLA4-2415
ucuggauaacuaaguggagac

SEQ ID NO: 47815 - RNA, 22 nt, Artificial Sequence
  Synthetic oligonucleotide: CTLA4-2416
aucuggauaacuaaguggagac

SEQ ID NO: 47816 - RNA, 23 nt, Artificial Sequence
  Synthetic oligonucleotide: CTLA4-2417
gaucuggauaacuaaguggagac

SEQ ID NO: 47817 - RNA, 24 nt, Artificial Sequence
  Synthetic oligonucleotide: CTLA4-2418
ggaucuggauaacuaaguggagac

SEQ ID NO: 47818 - RNA, 18 nt, Artificial Sequence
  Synthetic oligonucleotide: CTLA4-2419
uuuuuguuuugguuuuac

SEQ ID NO: 47819 - RNA, 19 nt, Artificial Sequence
  Synthetic oligonucleotide: CTLA4-2420
cuuuuuguuuugguuuuac

SEQ ID NO: 47820 - RNA, 20 nt, Artificial Sequence
  Synthetic oligonucleotide: CTLA4-991
ccuuuuuguuuugguuuuac

SEQ ID NO: 47821 - RNA, 21 nt, Artificial Sequence
  Synthetic oligonucleotide: CTLA4-2421
gccuuuuuguuuugguuuuac

SEQ ID NO: 47822 - RNA, 22 nt, Artificial Sequence
  Synthetic oligonucleotide: CTLA4-2422
agccuuuuuguuuugguuuuac

SEQ ID NO: 47823 - RNA, 23 nt, Artificial Sequence
  Synthetic oligonucleotide: CTLA4-2423
aagccuuuuuguuuugguuuuac

SEQ ID NO: 47824 - RNA, 24 nt, Artificial Sequence
  Synthetic oligonucleotide: CTLA4-2424
aaagccuuuuuguuuugguuuuac

SEQ ID NO: 47825 - RNA, 18 nt, Artificial Sequence
  Synthetic oligonucleotide: CTLA4-2425
ugcuaacuuucugagccc

SEQ ID NO: 47826 - RNA, 19 nt, Artificial Sequence
  Synthetic oligonucleotide: CTLA4-2426
cugcuaacuuucugagccc

SEQ ID NO: 47827 - RNA, 20 nt, Artificial Sequence
  Synthetic oligonucleotide: CTLA4-967
gcugcuaacuuucugagccc

SEQ ID NO: 47828 - RNA, 21 nt, Artificial Sequence
  Synthetic oligonucleotide: CTLA4-2427
ggcugcuaacuuucugagccc

SEQ ID NO: 47829 - RNA, 22 nt, Artificial Sequence
  Synthetic oligonucleotide: CTLA4-2428
aggcugcuaacuuucugagccc

SEQ ID NO: 47830 - RNA, 23 nt, Artificial Sequence
  Synthetic oligonucleotide: CTLA4-2429
uaggcugcuaacuuucugagccc

SEQ ID NO: 47831 - RNA, 24 nt, Artificial Sequence
  Synthetic oligonucleotide: CTLA4-2430
cuaggcugcuaacuuucugagccc

SEQ ID NO: 47832 - RNA, 18 nt, Artificial Sequence
  Synthetic oligonucleotide: CTLA4-2431
aacugcucccugcuggcc

SEQ ID NO: 47833 - RNA, 19 nt, Artificial Sequence
  Synthetic oligonucleotide: CTLA4-2432
caacugcucccugcuggcc

SEQ ID NO: 47834 - RNA, 20 nt, Artificial Sequence
  Synthetic oligonucleotide: CTLA4-1030
ccaacugcucccugcuggcc

SEQ ID NO: 47835 - RNA, 21 nt, Artificial Sequence
  Synthetic oligonucleotide: CTLA4-2433
cccaacugcucccugcuggcc

SEQ ID NO: 47836 - RNA, 22 nt, Artificial Sequence
  Synthetic oligonucleotide: CTLA4-2434
gcccaacugcucccugcuggcc

SEQ ID NO: 47837 - RNA, 23 nt, Artificial Sequence
  Synthetic oligonucleotide: CTLA4-2435
cgcccaacugcucccugcuggcc

SEQ ID NO: 47838 - RNA, 24 nt, Artificial Sequence
  Synthetic oligonucleotide: CTLA4-2436
ccgcccaacugcucccugcuggcc

SEQ ID NO: 47839 - RNA, 18 nt, Artificial Sequence
  Synthetic oligonucleotide: CTLA4-2437
uugaacccacacagaauc

SEQ ID NO: 47840 - RNA, 19 nt, Artificial Sequence
  Synthetic oligonucleotide: CTLA4-2438
uuugaacccacacagaauc

SEQ ID NO: 47841 - RNA, 20 nt, Artificial Sequence
  Synthetic oligonucleotide: CTLA4-996
guuugaacccacacagaauc

SEQ ID NO: 47842 - RNA, 21 nt, Artificial Sequence
  Synthetic oligonucleotide: CTLA4-2439
uguuugaacccacacagaauc

SEQ ID NO: 47843 - RNA, 22 nt, Artificial Sequence
  Synthetic oligonucleotide: CTLA4-2440
guguuugaacccacacagaauc

SEQ ID NO: 47844 - RNA, 23 nt, Artificial Sequence
  Synthetic oligonucleotide: CTLA4-2441
uguguuugaacccacacagaauc

SEQ ID NO: 47845 - RNA, 24 nt, Artificial Sequence
  Synthetic oligonucleotide: CTLA4-2442
auguguuugaacccacacagaauc

SEQ ID NO: 47846 - RNA, 18 nt, Artificial Sequence
  Synthetic oligonucleotide: CTLA4-2443
gcaaaaccuuucaggauc

SEQ ID NO: 47847 - RNA, 19 nt, Artificial Sequence
  Synthetic oligonucleotide: CTLA4-2444
agcaaaaccuuucaggauc

SEQ ID NO: 47848 - RNA, 20 nt, Artificial Sequence
  Synthetic oligonucleotide: CTLA4-1000
gagcaaaaccuuucaggauc

SEQ ID NO: 47849 - RNA, 21 nt, Artificial Sequence
  Synthetic oligonucleotide: CTLA4-2445
agagcaaaaccuuucaggauc

SEQ ID NO: 47850 - RNA, 22 nt, Artificial Sequence
  Synthetic oligonucleotide: CTLA4-2446
uagagcaaaaccuuucaggauc

SEQ ID NO: 47851 - RNA, 23 nt, Artificial Sequence
  Synthetic oligonucleotide: CTLA4-2447
guagagcaaaaccuuucaggauc

SEQ ID NO: 47852 - RNA, 24 nt, Artificial Sequence
  Synthetic oligonucleotide: CTLA4-2448
aguagagcaaaaccuuucaggauc

SEQ ID NO: 47853 - RNA, 18 nt, Artificial Sequence
  Synthetic oligonucleotide: CTLA4-2449
agcgguguucaggucuuc

SEQ ID NO: 47854 - RNA, 19 nt, Artificial Sequence
  Synthetic oligonucleotide: CTLA4-2450
gagcgguguucaggucuuc

SEQ ID NO: 47855 - RNA, 20 nt, Artificial Sequence
  Synthetic oligonucleotide: CTLA4-548
ggagcgguguucaggucuuc

SEQ ID NO: 47856 - RNA, 21 nt, Artificial Sequence
  Synthetic oligonucleotide: CTLA4-2451
gggagcgguguucaggucuuc

SEQ ID NO: 47857 - RNA, 22 nt, Artificial Sequence
  Synthetic oligonucleotide: CTLA4-2452
ugggagcgguguucaggucuuc

SEQ ID NO: 47858 - RNA, 23 nt, Artificial Sequence
  Synthetic oligonucleotide: CTLA4-2453
augggagcgguguucaggucuuc

SEQ ID NO: 47859 - RNA, 24 nt, Artificial Sequence
  Synthetic oligonucleotide: CTLA4-2454
uaugggagcgguguucaggucuuc

SEQ ID NO: 47860 - RNA, 18 nt, Artificial Sequence
  Synthetic oligonucleotide: CTLA4-2455
ggagacuuggagaauuuc

SEQ ID NO: 47861 - RNA, 19 nt, Artificial Sequence
  Synthetic oligonucleotide: CTLA4-2456
uggagacuuggagaauuuc

SEQ ID NO: 47862 - RNA, 20 nt, Artificial Sequence
  Synthetic oligonucleotide: CTLA4-972
guggagacuuggagaauuuc

SEQ ID NO: 47863 - RNA, 21 nt, Artificial Sequence
  Synthetic oligonucleotide: CTLA4-2457
aguggagacuuggagaauuuc

SEQ ID NO: 47864 - RNA, 22 nt, Artificial Sequence
  Synthetic oligonucleotide: CTLA4-2458
aaguggagacuuggagaauuuc

SEQ ID NO: 47865 - RNA, 23 nt, Artificial Sequence
  Synthetic oligonucleotide: CTLA4-2459
uaaguggagacuuggagaauuuc

SEQ ID NO: 47866 - RNA, 24 nt, Artificial Sequence
  Synthetic oligonucleotide: CTLA4-2460
cuaaguggagacuuggagaauuuc

SEQ ID NO: 47867 - RNA, 18 nt, Artificial Sequence
  Synthetic oligonucleotide: CTLA4-2461
guucaggucuucaggaag

SEQ ID NO: 47868 - RNA, 19 nt, Artificial Sequence
  Synthetic oligonucleotide: CTLA4-2462
uguucaggucuucaggaag

SEQ ID NO: 47869 - RNA, 20 nt, Artificial Sequence
  Synthetic oligonucleotide: CTLA4-1002
guguucaggucuucaggaag

SEQ ID NO: 47870 - RNA, 21 nt, Artificial Sequence
  Synthetic oligonucleotide: CTLA4-2463
gguguucaggucuucaggaag

SEQ ID NO: 47871 - RNA, 22 nt, Artificial Sequence
  Synthetic oligonucleotide: CTLA4-2464
cgguguucaggucuucaggaag

SEQ ID NO: 47872 - RNA, 23 nt, Artificial Sequence
  Synthetic oligonucleotide: CTLA4-2465
gcgguguucaggucuucaggaag

SEQ ID NO: 47873 - RNA, 24 nt, Artificial Sequence
  Synthetic oligonucleotide: CTLA4-2466
agcgguguucaggucuucaggaag

SEQ ID NO: 47874 - RNA, 18 nt, Artificial Sequence
  Synthetic oligonucleotide: CTLA4-2467
aggaucuggauaacuaag

SEQ ID NO: 47875 - RNA, 19 nt, Artificial Sequence
  Synthetic oligonucleotide: CTLA4-2468
gaggaucuggauaacuaag

SEQ ID NO: 47876 - RNA, 20 nt, Artificial Sequence
  Synthetic oligonucleotide: CTLA4-560
ugaggaucuggauaacuaag

SEQ ID NO: 47877 - RNA, 21 nt, Artificial Sequence
  Synthetic oligonucleotide: CTLA4-2469
uugaggaucuggauaacuaag

SEQ ID NO: 47878 - RNA, 22 nt, Artificial Sequence
  Synthetic oligonucleotide: CTLA4-2470
uuugaggaucuggauaacuaag

SEQ ID NO: 47879 - RNA, 23 nt, Artificial Sequence
  Synthetic oligonucleotide: CTLA4-2471
cuuugaggaucuggauaacuaag

SEQ ID NO: 47880 - RNA, 24 nt, Artificial Sequence
  Synthetic oligonucleotide: CTLA4-2472
acuuugaggaucuggauaacuaag

SEQ ID NO: 47881 - RNA, 18 nt, Artificial Sequence
  Synthetic oligonucleotide: CTLA4-1583
ccugguagccagguucag

SEQ ID NO: 47882 - RNA, 19 nt, Artificial Sequence
  Synthetic oligonucleotide: CTLA4-1584
uccugguagccagguucag

SEQ ID NO: 47883 - RNA, 20 nt, Artificial Sequence
  Synthetic oligonucleotide: CTLA4-280
guccugguagccagguucag

SEQ ID NO: 47884 - RNA, 21 nt, Artificial Sequence
  Synthetic oligonucleotide: CTLA4-1585
gguccugguagccagguucag

SEQ ID NO: 47885 - RNA, 22 nt, Artificial Sequence
  Synthetic oligonucleotide: CTLA4-1586
agguccugguagccagguucag

SEQ ID NO: 47886 - RNA, 23 nt, Artificial Sequence
  Synthetic oligonucleotide: CTLA4-1587
cagguccugguagccagguucag

SEQ ID NO: 47887 - RNA, 24 nt, Artificial Sequence
  Synthetic oligonucleotide: CTLA4-1588
ccagguccugguagccagguucag

SEQ ID NO: 47888 - RNA, 18 nt, Artificial Sequence
  Synthetic oligonucleotide: CTLA4-1589
gaagacagggaugaagag

SEQ ID NO: 47889 - RNA, 19 nt, Artificial Sequence
  Synthetic oligonucleotide: CTLA4-1590
agaagacagggaugaagag

SEQ ID NO: 47890 - RNA, 20 nt, Artificial Sequence
  Synthetic oligonucleotide: CTLA4-285
cagaagacagggaugaagag

SEQ ID NO: 47891 - RNA, 21 nt, Artificial Sequence
  Synthetic oligonucleotide: CTLA4-1591
gcagaagacagggaugaagag

SEQ ID NO: 47892 - RNA, 22 nt, Artificial Sequence
  Synthetic oligonucleotide: CTLA4-1592
ugcagaagacagggaugaagag

SEQ ID NO: 47893 - RNA, 23 nt, Artificial Sequence
  Synthetic oligonucleotide: CTLA4-1593
uugcagaagacagggaugaagag

SEQ ID NO: 47894 - RNA, 24 nt, Artificial Sequence
  Synthetic oligonucleotide: CTLA4-1594
uuugcagaagacagggaugaagag

SEQ ID NO: 47895 - RNA, 18 nt, Artificial Sequence
  Synthetic oligonucleotide: CTLA4-2473
caaaugaaacccagguag

SEQ ID NO: 47896 - RNA, 19 nt, Artificial Sequence
  Synthetic oligonucleotide: CTLA4-2474
acaaaugaaacccagguag

SEQ ID NO: 47897 - RNA, 20 nt, Artificial Sequence
  Synthetic oligonucleotide: CTLA4-1021
aacaaaugaaacccagguag

SEQ ID NO: 47898 - RNA, 21 nt, Artificial Sequence
  Synthetic oligonucleotide: CTLA4-2475
aaacaaaugaaacccagguag

SEQ ID NO: 47899 - RNA, 22 nt, Artificial Sequence
  Synthetic oligonucleotide: CTLA4-2476
gaaacaaaugaaacccagguag

SEQ ID NO: 47900 - RNA, 23 nt, Artificial Sequence
  Synthetic oligonucleotide: CTLA4-2477
ugaaacaaaugaaacccagguag

SEQ ID NO: 47901 - RNA, 24 nt, Artificial Sequence
  Synthetic oligonucleotide: CTLA4-2478
cugaaacaaaugaaacccagguag

SEQ ID NO: 47902 - RNA, 18 nt, Artificial Sequence
  Synthetic oligonucleotide: CTLA4-2479
guggguuuagcuguuacg

SEQ ID NO: 47903 - RNA, 19 nt, Artificial Sequence
  Synthetic oligonucleotide: CTLA4-2480
cguggguuuagcuguuacg

SEQ ID NO: 47904 - RNA, 20 nt, Artificial Sequence
  Synthetic oligonucleotide: CTLA4-987
ccguggguuuagcuguuacg

SEQ ID NO: 47905 - RNA, 21 nt, Artificial Sequence
  Synthetic oligonucleotide: CTLA4-2481
gccguggguuuagcuguuacg

SEQ ID NO: 47906 - RNA, 22 nt, Artificial Sequence
  Synthetic oligonucleotide: CTLA4-2482
agccguggguuuagcuguuacg

SEQ ID NO: 47907 - RNA, 23 nt, Artificial Sequence
  Synthetic oligonucleotide: CTLA4-2483
aagccguggguuuagcuguuacg

SEQ ID NO: 47908 - RNA, 24 nt, Artificial Sequence
  Synthetic oligonucleotide: CTLA4-2484
gaagccguggguuuagcuguuacg

SEQ ID NO: 47909 - RNA, 18 nt, Artificial Sequence
  Synthetic oligonucleotide: CTLA4-1595
cagcugagccuugugccg

SEQ ID NO: 47910 - RNA, 19 nt, Artificial Sequence
  Synthetic oligonucleotide: CTLA4-1596
ucagcugagccuugugccg

SEQ ID NO: 47911 - RNA, 20 nt, Artificial Sequence
  Synthetic oligonucleotide: CTLA4-279
uucagcugagccuugugccg

SEQ ID NO: 47912 - RNA, 21 nt, Artificial Sequence
  Synthetic oligonucleotide: CTLA4-1597
guucagcugagccuugugccg

SEQ ID NO: 47913 - RNA, 22 nt, Artificial Sequence
  Synthetic oligonucleotide: CTLA4-1598
gguucagcugagccuugugccg

SEQ ID NO: 47914 - RNA, 23 nt, Artificial Sequence
  Synthetic oligonucleotide: CTLA4-1599
agguucagcugagccuugugccg

SEQ ID NO: 47915 - RNA, 24 nt, Artificial Sequence
  Synthetic oligonucleotide: CTLA4-1600
cagguucagcugagccuugugccg

SEQ ID NO: 47916 - RNA, 18 nt, Artificial Sequence
  Synthetic oligonucleotide: CTLA4-2485
aaacaaaugaaacccagg

SEQ ID NO: 47917 - RNA, 19 nt, Artificial Sequence
  Synthetic oligonucleotide: CTLA4-2486
gaaacaaaugaaacccagg

SEQ ID NO: 47918 - RNA, 20 nt, Artificial Sequence
  Synthetic oligonucleotide: CTLA4-1023
ugaaacaaaugaaacccagg

SEQ ID NO: 47919 - RNA, 21 nt, Artificial Sequence
  Synthetic oligonucleotide: CTLA4-2487
cugaaacaaaugaaacccagg

SEQ ID NO: 47920 - RNA, 22 nt, Artificial Sequence
  Synthetic oligonucleotide: CTLA4-2488
gcugaaacaaaugaaacccagg

SEQ ID NO: 47921 - RNA, 23 nt, Artificial Sequence
  Synthetic oligonucleotide: CTLA4-2489
ugcugaaacaaaugaaacccagg

SEQ ID NO: 47922 - RNA, 24 nt, Artificial Sequence
  Synthetic oligonucleotide: CTLA4-2490
cugcugaaacaaaugaaacccagg

SEQ ID NO: 47923 - RNA, 18 nt, Artificial Sequence
  Synthetic oligonucleotide: CTLA4-1607
ccuuugcagaagacaggg

SEQ ID NO: 47924 - RNA, 19 nt, Artificial Sequence
  Synthetic oligonucleotide: CTLA4-1608
accuuugcagaagacaggg

SEQ ID NO: 47925 - RNA, 20 nt, Artificial Sequence
  Synthetic oligonucleotide: CTLA4-288
caccuuugcagaagacaggg

SEQ ID NO: 47926 - RNA, 21 nt, Artificial Sequence
  Synthetic oligonucleotide: CTLA4-1609
ucaccuuugcagaagacaggg

SEQ ID NO: 47927 - RNA, 22 nt, Artificial Sequence
  Synthetic oligonucleotide: CTLA4-1610
cucaccuuugcagaagacaggg

SEQ ID NO: 47928 - RNA, 23 nt, Artificial Sequence
  Synthetic oligonucleotide: CTLA4-1611
acucaccuuugcagaagacaggg

SEQ ID NO: 47929 - RNA, 24 nt, Artificial Sequence
  Synthetic oligonucleotide: CTLA4-1612
cacucaccuuugcagaagacaggg

SEQ ID NO: 47930 - RNA, 18 nt, Artificial Sequence
  Synthetic oligonucleotide: CTLA4-2491
aaacaagccaauccaugg

SEQ ID NO: 47931 - RNA, 19 nt, Artificial Sequence
  Synthetic oligonucleotide: CTLA4-2492
aaaacaagccaauccaugg

SEQ ID NO: 47932 - RNA, 20 nt, Artificial Sequence
  Synthetic oligonucleotide: CTLA4-984
caaaacaagccaauccaugg

SEQ ID NO: 47933 - RNA, 21 nt, Artificial Sequence
  Synthetic oligonucleotide: CTLA4-2493
acaaaacaagccaauccaugg

SEQ ID NO: 47934 - RNA, 22 nt, Artificial Sequence
  Synthetic oligonucleotide: CTLA4-2494
aacaaaacaagccaauccaugg

SEQ ID NO: 47935 - RNA, 23 nt, Artificial Sequence
  Synthetic oligonucleotide: CTLA4-2495
gaacaaaacaagccaauccaugg

SEQ ID NO: 47936 - RNA, 24 nt, Artificial Sequence
  Synthetic oligonucleotide: CTLA4-2496
ugaacaaaacaagccaauccaugg

SEQ ID NO: 47937 - RNA, 18 nt, Artificial Sequence
  Synthetic oligonucleotide: CTLA4-1613
uugcagaagacagggaug

SEQ ID NO: 47938 - RNA, 19 nt, Artificial Sequence
  Synthetic oligonucleotide: CTLA4-1614
uuugcagaagacagggaug

SEQ ID NO: 47939 - RNA, 20 nt, Artificial Sequence
  Synthetic oligonucleotide: CTLA4-287
cuuugcagaagacagggaug

SEQ ID NO: 47940 - RNA, 21 nt, Artificial Sequence
  Synthetic oligonucleotide: CTLA4-1615
ccuuugcagaagacagggaug

SEQ ID NO: 47941 - RNA, 22 nt, Artificial Sequence
  Synthetic oligonucleotide: CTLA4-1616
accuuugcagaagacagggaug

SEQ ID NO: 47942 - RNA, 23 nt, Artificial Sequence
  Synthetic oligonucleotide: CTLA4-1617
caccuuugcagaagacagggaug

SEQ ID NO: 47943 - RNA, 24 nt, Artificial Sequence
  Synthetic oligonucleotide: CTLA4-1618
ucaccuuugcagaagacagggaug

SEQ ID NO: 47944 - RNA, 18 nt, Artificial Sequence
  Synthetic oligonucleotide: CTLA4-2497
aaucacugccuuugacug

SEQ ID NO: 47945 - RNA, 19 nt, Artificial Sequence
  Synthetic oligonucleotide: CTLA4-2498
aaaucacugccuuugacug

SEQ ID NO: 47946 - RNA, 20 nt, Artificial Sequence
  Synthetic oligonucleotide: CTLA4-1025
uaaaucacugccuuugacug

SEQ ID NO: 47947 - RNA, 21 nt, Artificial Sequence
  Synthetic oligonucleotide: CTLA4-2499
auaaaucacugccuuugacug

SEQ ID NO: 47948 - RNA, 22 nt, Artificial Sequence
  Synthetic oligonucleotide: CTLA4-2500
uauaaaucacugccuuugacug

SEQ ID NO: 47949 - RNA, 23 nt, Artificial Sequence
  Synthetic oligonucleotide: CTLA4-2501
cuauaaaucacugccuuugacug

SEQ ID NO: 47950 - RNA, 24 nt, Artificial Sequence
  Synthetic oligonucleotide: CTLA4-2502
gcuauaaaucacugccuuugacug

SEQ ID NO: 47951 - RNA, 18 nt, Artificial Sequence
  Synthetic oligonucleotide: CTLA4-1625
agaaaaaacaggagagug

SEQ ID NO: 47952 - RNA, 19 nt, Artificial Sequence
  Synthetic oligonucleotide: CTLA4-1626
aagaaaaaacaggagagug

SEQ ID NO: 47953 - RNA, 20 nt, Artificial Sequence
  Synthetic oligonucleotide: CTLA4-281
gaagaaaaaacaggagagug

SEQ ID NO: 47954 - RNA, 21 nt, Artificial Sequence
  Synthetic oligonucleotide: CTLA4-1627
agaagaaaaaacaggagagug

SEQ ID NO: 47955 - RNA, 22 nt, Artificial Sequence
  Synthetic oligonucleotide: CTLA4-1628
gagaagaaaaaacaggagagug

SEQ ID NO: 47956 - RNA, 23 nt, Artificial Sequence
  Synthetic oligonucleotide: CTLA4-1629
agagaagaaaaaacaggagagug

SEQ ID NO: 47957 - RNA, 24 nt, Artificial Sequence
  Synthetic oligonucleotide: CTLA4-1630
aagagaagaaaaaacaggagagug

SEQ ID NO: 47958 - RNA, 18 nt, Artificial Sequence
  Synthetic oligonucleotide: CTLA4-1631
aagucucacucaccuuug

SEQ ID NO: 47959 - RNA, 19 nt, Artificial Sequence
  Synthetic oligonucleotide: CTLA4-1632
aaagucucacucaccuuug

SEQ ID NO: 47960 - RNA, 20 nt, Artificial Sequence
  Synthetic oligonucleotide: CTLA4-291
aaaagucucacucaccuuug

SEQ ID NO: 47961 - RNA, 21 nt, Artificial Sequence
  Synthetic oligonucleotide: CTLA4-1633
caaaagucucacucaccuuug

SEQ ID NO: 47962 - RNA, 22 nt, Artificial Sequence
  Synthetic oligonucleotide: CTLA4-1634
ccaaaagucucacucaccuuug

SEQ ID NO: 47963 - RNA, 23 nt, Artificial Sequence
  Synthetic oligonucleotide: CTLA4-1635
uccaaaagucucacucaccuuug

SEQ ID NO: 47964 - RNA, 24 nt, Artificial Sequence
  Synthetic oligonucleotide: CTLA4-1636
cuccaaaagucucacucaccuuug

SEQ ID NO: 47965 - RNA, 18 nt, Artificial Sequence
  Synthetic oligonucleotide: CTLA4-2503
auggaaaauguauucaau

SEQ ID NO: 47966 - RNA, 19 nt, Artificial Sequence
  Synthetic oligonucleotide: CTLA4-2504
gauggaaaauguauucaau

SEQ ID NO: 47967 - RNA, 20 nt, Artificial Sequence
  Synthetic oligonucleotide: CTLA4-982
ggauggaaaauguauucaau

SEQ ID NO: 47968 - RNA, 21 nt, Artificial Sequence
  Synthetic oligonucleotide: CTLA4-2505
uggauggaaaauguauucaau

SEQ ID NO: 47969 - RNA, 22 nt, Artificial Sequence
  Synthetic oligonucleotide: CTLA4-2506
auggauggaaaauguauucaau

SEQ ID NO: 47970 - RNA, 23 nt, Artificial Sequence
  Synthetic oligonucleotide: CTLA4-2507
cauggauggaaaauguauucaau

SEQ ID NO: 47971 - RNA, 24 nt, Artificial Sequence
  Synthetic oligonucleotide: CTLA4-2508
ccauggauggaaaauguauucaau

SEQ ID NO: 47972 - RNA, 18 nt, Artificial Sequence
  Synthetic oligonucleotide: CTLA4-1637
ggcaagccauggcuuuau

SEQ ID NO: 47973 - RNA, 19 nt, Artificial Sequence
  Synthetic oligonucleotide: CTLA4-1638
aggcaagccauggcuuuau

SEQ ID NO: 47974 - RNA, 20 nt, Artificial Sequence
  Synthetic oligonucleotide: CTLA4-70
aaggcaagccauggcuuuau

SEQ ID NO: 47975 - RNA, 21 nt, Artificial Sequence
  Synthetic oligonucleotide: CTLA4-1639
caaggcaagccauggcuuuau

SEQ ID NO: 47976 - RNA, 22 nt, Artificial Sequence
  Synthetic oligonucleotide: CTLA4-1640
ccaaggcaagccauggcuuuau

SEQ ID NO: 47977 - RNA, 23 nt, Artificial Sequence
  Synthetic oligonucleotide: CTLA4-1641
uccaaggcaagccauggcuuuau

SEQ ID NO: 47978 - RNA, 24 nt, Artificial Sequence
  Synthetic oligonucleotide: CTLA4-1642
auccaaggcaagccauggcuuuau

SEQ ID NO: 47979 - RNA, 18 nt, Artificial Sequence
  Synthetic oligonucleotide: CTLA4-2509
ugaagcuucauguucacu

SEQ ID NO: 47980 - RNA, 19 nt, Artificial Sequence
  Synthetic oligonucleotide: CTLA4-2510
cugaagcuucauguucacu

SEQ ID NO: 47981 - RNA, 20 nt, Artificial Sequence
  Synthetic oligonucleotide: CTLA4-980
acugaagcuucauguucacu

SEQ ID NO: 47982 - RNA, 21 nt, Artificial Sequence
  Synthetic oligonucleotide: CTLA4-2511
aacugaagcuucauguucacu

SEQ ID NO: 47983 - RNA, 22 nt, Artificial Sequence
  Synthetic oligonucleotide: CTLA4-2512
aaacugaagcuucauguucacu

SEQ ID NO: 47984 - RNA, 23 nt, Artificial Sequence
  Synthetic oligonucleotide: CTLA4-2513
gaaacugaagcuucauguucacu

SEQ ID NO: 47985 - RNA, 24 nt, Artificial Sequence
  Synthetic oligonucleotide: CTLA4-2514
ugaaacugaagcuucauguucacu

SEQ ID NO: 47986 - RNA, 18 nt, Artificial Sequence
  Synthetic oligonucleotide: CTLA4-2515
gauaacuaaguggagacu

SEQ ID NO: 47987 - RNA, 19 nt, Artificial Sequence
  Synthetic oligonucleotide: CTLA4-2516
ggauaacuaaguggagacu

SEQ ID NO: 47988 - RNA, 20 nt, Artificial Sequence
  Synthetic oligonucleotide: CTLA4-561
uggauaacuaaguggagacu

SEQ ID NO: 47989 - RNA, 21 nt, Artificial Sequence
  Synthetic oligonucleotide: CTLA4-2517
cuggauaacuaaguggagacu

SEQ ID NO: 47990 - RNA, 22 nt, Artificial Sequence
  Synthetic oligonucleotide: CTLA4-2518
ucuggauaacuaaguggagacu

SEQ ID NO: 47991 - RNA, 23 nt, Artificial Sequence
  Synthetic oligonucleotide: CTLA4-2519
aucuggauaacuaaguggagacu

SEQ ID NO: 47992 - RNA, 24 nt, Artificial Sequence
  Synthetic oligonucleotide: CTLA4-2520
gaucuggauaacuaaguggagacu

SEQ ID NO: 47993 - RNA, 18 nt, Artificial Sequence
  Synthetic oligonucleotide: CTLA4-2521
uuucaggauccugaagcu

SEQ ID NO: 47994 - RNA, 19 nt, Artificial Sequence
  Synthetic oligonucleotide: CTLA4-2522
cuuucaggauccugaagcu

SEQ ID NO: 47995 - RNA, 20 nt, Artificial Sequence
  Synthetic oligonucleotide: CTLA4-999
ccuuucaggauccugaagcu

SEQ ID NO: 47996 - RNA, 21 nt, Artificial Sequence
  Synthetic oligonucleotide: CTLA4-2523
accuuucaggauccugaagcu

SEQ ID NO: 47997 - RNA, 22 nt, Artificial Sequence
  Synthetic oligonucleotide: CTLA4-2524
aaccuuucaggauccugaagcu

SEQ ID NO: 47998 - RNA, 23 nt, Artificial Sequence
  Synthetic oligonucleotide: CTLA4-2525
aaaccuuucaggauccugaagcu

SEQ ID NO: 47999 - RNA, 24 nt, Artificial Sequence
  Synthetic oligonucleotide: CTLA4-2526
aaaaccuuucaggauccugaagcu

SEQ ID NO: 48000 - RNA, 18 nt, Artificial Sequence
  Synthetic oligonucleotide: CTLA4-2527
aaaaacuguauucuaucu

SEQ ID NO: 48001 - RNA, 19 nt, Artificial Sequence
  Synthetic oligonucleotide: CTLA4-2528
uaaaaacuguauucuaucu

SEQ ID NO: 48002 - RNA, 20 nt, Artificial Sequence
  Synthetic oligonucleotide: CTLA4-1249
auaaaaacuguauucuaucu

SEQ ID NO: 48003 - RNA, 21 nt, Artificial Sequence
  Synthetic oligonucleotide: CTLA4-2529
aauaaaaacuguauucuaucu

SEQ ID NO: 48004 - RNA, 22 nt, Artificial Sequence
  Synthetic oligonucleotide: CTLA4-2530
uaauaaaaacuguauucuaucu

SEQ ID NO: 48005 - RNA, 23 nt, Artificial Sequence
  Synthetic oligonucleotide: CTLA4-2531
uuaauaaaaacuguauucuaucu

SEQ ID NO: 48006 - RNA, 24 nt, Artificial Sequence
  Synthetic oligonucleotide: CTLA4-2532
auuaauaaaaacuguauucuaucu

SEQ ID NO: 48007 - RNA, 18 nt, Artificial Sequence
  Synthetic oligonucleotide: CTLA4-2533
aacaaaugaaacccaggu

SEQ ID NO: 48008 - RNA, 19 nt, Artificial Sequence
  Synthetic oligonucleotide: CTLA4-2534
aaacaaaugaaacccaggu

SEQ ID NO: 48009 - RNA, 20 nt, Artificial Sequence
  Synthetic oligonucleotide: CTLA4-533
gaaacaaaugaaacccaggu

SEQ ID NO: 48010 - RNA, 21 nt, Artificial Sequence
  Synthetic oligonucleotide: CTLA4-2535
ugaaacaaaugaaacccaggu

SEQ ID NO: 48011 - RNA, 22 nt, Artificial Sequence
  Synthetic oligonucleotide: CTLA4-2536
cugaaacaaaugaaacccaggu

SEQ ID NO: 48012 - RNA, 23 nt, Artificial Sequence
  Synthetic oligonucleotide: CTLA4-2537
gcugaaacaaaugaaacccaggu

SEQ ID NO: 48013 - RNA, 24 nt, Artificial Sequence
  Synthetic oligonucleotide: CTLA4-2538
ugcugaaacaaaugaaacccaggu

SEQ ID NO: 48014 - RNA, 18 nt, Artificial Sequence
  Synthetic oligonucleotide: CTLA4-2539
ugaagcuuugaaaugugu

SEQ ID NO: 48015 - RNA, 19 nt, Artificial Sequence
  Synthetic oligonucleotide: CTLA4-2540
cugaagcuuugaaaugugu

SEQ ID NO: 48016 - RNA, 20 nt, Artificial Sequence
  Synthetic oligonucleotide: CTLA4-998
ccugaagcuuugaaaugugu

SEQ ID NO: 48017 - RNA, 21 nt, Artificial Sequence
  Synthetic oligonucleotide: CTLA4-2541
uccugaagcuuugaaaugugu

SEQ ID NO: 48018 - RNA, 22 nt, Artificial Sequence
  Synthetic oligonucleotide: CTLA4-2542
auccugaagcuuugaaaugugu

SEQ ID NO: 48019 - RNA, 23 nt, Artificial Sequence
  Synthetic oligonucleotide: CTLA4-2543
gauccugaagcuuugaaaugugu

SEQ ID NO: 48020 - RNA, 24 nt, Artificial Sequence
  Synthetic oligonucleotide: CTLA4-2544
ggauccugaagcuuugaaaugugu

SEQ ID NO: 48021 - RNA, 18 nt, Artificial Sequence
  Synthetic oligonucleotide: CTLA4-2545
ccaauuuuauucaaucuu

SEQ ID NO: 48022 - RNA, 19 nt, Artificial Sequence
  Synthetic oligonucleotide: CTLA4-2546
cccaauuuuauucaaucuu

SEQ ID NO: 48023 - RNA, 20 nt, Artificial Sequence
  Synthetic oligonucleotide: CTLA4-969
ucccaauuuuauucaaucuu

SEQ ID NO: 48024 - RNA, 21 nt, Artificial Sequence
  Synthetic oligonucleotide: CTLA4-2547
aucccaauuuuauucaaucuu

SEQ ID NO: 48025 - RNA, 22 nt, Artificial Sequence
  Synthetic oligonucleotide: CTLA4-2548
aaucccaauuuuauucaaucuu

SEQ ID NO: 48026 - RNA, 23 nt, Artificial Sequence
  Synthetic oligonucleotide: CTLA4-2549
aaaucccaauuuuauucaaucuu

SEQ ID NO: 48027 - RNA, 24 nt, Artificial Sequence
  Synthetic oligonucleotide: CTLA4-2550
uaaaucccaauuuuauucaaucuu

SEQ ID NO: 48028 - RNA, 18 nt, Artificial Sequence
  Synthetic oligonucleotide: CTLA4-2551
gagcgguguucaggucuu

SEQ ID NO: 48029 - RNA, 19 nt, Artificial Sequence
  Synthetic oligonucleotide: CTLA4-2552
ggagcgguguucaggucuu

SEQ ID NO: 48030 - RNA, 20 nt, Artificial Sequence
  Synthetic oligonucleotide: CTLA4-1004
gggagcgguguucaggucuu

SEQ ID NO: 48031 - RNA, 21 nt, Artificial Sequence
  Synthetic oligonucleotide: CTLA4-2553
ugggagcgguguucaggucuu

SEQ ID NO: 48032 - RNA, 22 nt, Artificial Sequence
  Synthetic oligonucleotide: CTLA4-2554
augggagcgguguucaggucuu

SEQ ID NO: 48033 - RNA, 23 nt, Artificial Sequence
  Synthetic oligonucleotide: CTLA4-2555
uaugggagcgguguucaggucuu

SEQ ID NO: 48034 - RNA, 24 nt, Artificial Sequence
  Synthetic oligonucleotide: CTLA4-2556
uuaugggagcgguguucaggucuu

SEQ ID NO: 48035 - RNA, 18 nt, Artificial Sequence
  Synthetic oligonucleotide: CTLA4-2557
uccauuuagcauuugguu

SEQ ID NO: 48036 - RNA, 19 nt, Artificial Sequence
  Synthetic oligonucleotide: CTLA4-2558
auccauuuagcauuugguu

SEQ ID NO: 48037 - RNA, 20 nt, Artificial Sequence
  Synthetic oligonucleotide: CTLA4-1248
aauccauuuagcauuugguu

SEQ ID NO: 48038 - RNA, 21 nt, Artificial Sequence
  Synthetic oligonucleotide: CTLA4-2559
aaauccauuuagcauuugguu

SEQ ID NO: 48039 - RNA, 22 nt, Artificial Sequence
  Synthetic oligonucleotide: CTLA4-2560
uaaauccauuuagcauuugguu

SEQ ID NO: 48040 - RNA, 23 nt, Artificial Sequence
  Synthetic oligonucleotide: CTLA4-2561
cuaaauccauuuagcauuugguu

SEQ ID NO: 48041 - RNA, 24 nt, Artificial Sequence
  Synthetic oligonucleotide: CTLA4-2562
ccuaaauccauuuagcauuugguu

SEQ ID NO: 48042 - RNA, 18 nt, Artificial Sequence
  Synthetic oligonucleotide: CTLA4-2563
aauaccuggcgcucuguu

SEQ ID NO: 48043 - RNA, 19 nt, Artificial Sequence
  Synthetic oligonucleotide: CTLA4-2564
aaauaccuggcgcucuguu

SEQ ID NO: 48044 - RNA, 20 nt, Artificial Sequence
  Synthetic oligonucleotide: CTLA4-1031
uaaauaccuggcgcucuguu

SEQ ID NO: 48045 - RNA, 21 nt, Artificial Sequence
  Synthetic oligonucleotide: CTLA4-2565
cuaaauaccuggcgcucuguu

SEQ ID NO: 48046 - RNA, 22 nt, Artificial Sequence
  Synthetic oligonucleotide: CTLA4-2566
acuaaauaccuggcgcucuguu

SEQ ID NO: 48047 - RNA, 23 nt, Artificial Sequence
  Synthetic oligonucleotide: CTLA4-2567
uacuaaauaccuggcgcucuguu

SEQ ID NO: 48048 - RNA, 24 nt, Artificial Sequence
  Synthetic oligonucleotide: CTLA4-2568
cuacuaaauaccuggcgcucuguu

SEQ ID NO: 48049 - RNA, 18 nt, Artificial Sequence
  Synthetic oligonucleotide: CTLA4-2569
uacuaggcugcuaacuuu

SEQ ID NO: 48050 - RNA, 19 nt, Artificial Sequence
  Synthetic oligonucleotide: CTLA4-2570
cuacuaggcugcuaacuuu

SEQ ID NO: 48051 - RNA, 20 nt, Artificial Sequence
  Synthetic oligonucleotide: CTLA4-968
acuacuaggcugcuaacuuu

SEQ ID NO: 48052 - RNA, 21 nt, Artificial Sequence
  Synthetic oligonucleotide: CTLA4-2571
aacuacuaggcugcuaacuuu

SEQ ID NO: 48053 - RNA, 22 nt, Artificial Sequence
  Synthetic oligonucleotide: CTLA4-2572
aaacuacuaggcugcuaacuuu

SEQ ID NO: 48054 - RNA, 23 nt, Artificial Sequence
  Synthetic oligonucleotide: CTLA4-2573
aaaacuacuaggcugcuaacuuu

SEQ ID NO: 48055 - RNA, 24 nt, Artificial Sequence
  Synthetic oligonucleotide: CTLA4-2574
caaaacuacuaggcugcuaacuuu

SEQ ID NO: 48056 - RNA, 18 nt, Artificial Sequence
  Synthetic oligonucleotide: CTLA4-1649
aaggcaagccauggcuuu

SEQ ID NO: 48057 - RNA, 19 nt, Artificial Sequence
  Synthetic oligonucleotide: CTLA4-1650
caaggcaagccauggcuuu

SEQ ID NO: 48058 - RNA, 20 nt, Artificial Sequence
  Synthetic oligonucleotide: CTLA4-278
ccaaggcaagccauggcuuu

SEQ ID NO: 48059 - RNA, 21 nt, Artificial Sequence
  Synthetic oligonucleotide: CTLA4-1651
uccaaggcaagccauggcuuu

SEQ ID NO: 48060 - RNA, 22 nt, Artificial Sequence
  Synthetic oligonucleotide: CTLA4-1652
auccaaggcaagccauggcuuu

SEQ ID NO: 48061 - RNA, 23 nt, Artificial Sequence
  Synthetic oligonucleotide: CTLA4-1653
aauccaaggcaagccauggcuuu

SEQ ID NO: 48062 - RNA, 24 nt, Artificial Sequence
  Synthetic oligonucleotide: CTLA4-1654
aaauccaaggcaagccauggcuuu

SEQ ID NO: 48063 - RNA, 18 nt, Artificial Sequence
  Synthetic oligonucleotide: CTLA4-2575
ccuuuuuguuuugguuuu

SEQ ID NO: 48064 - RNA, 19 nt, Artificial Sequence
  Synthetic oligonucleotide: CTLA4-2576
gccuuuuuguuuugguuuu

SEQ ID NO: 48065 - RNA, 20 nt, Artificial Sequence
  Synthetic oligonucleotide: CTLA4-992
agccuuuuuguuuugguuuu

SEQ ID NO: 48066 - RNA, 21 nt, Artificial Sequence
  Synthetic oligonucleotide: CTLA4-2577
aagccuuuuuguuuugguuuu

SEQ ID NO: 48067 - RNA, 22 nt, Artificial Sequence
  Synthetic oligonucleotide: CTLA4-2578
aaagccuuuuuguuuugguuuu

SEQ ID NO: 48068 - RNA, 23 nt, Artificial Sequence
  Synthetic oligonucleotide: CTLA4-2579
gaaagccuuuuuguuuugguuuu

SEQ ID NO: 48069 - RNA, 24 nt, Artificial Sequence
  Synthetic oligonucleotide: CTLA4-2580
agaaagccuuuuuguuuugguuuu

SEQ ID NO: 48070 - RNA, 18 nt, Artificial Sequence
  Synthetic oligonucleotide: CTLA4-2581
ccagaagauugaauaaaa

SEQ ID NO: 48071 - RNA, 19 nt, Artificial Sequence
  Synthetic oligonucleotide: CTLA4-2582
cccagaagauugaauaaaa

SEQ ID NO: 48072 - RNA, 20 nt, Artificial Sequence
  Synthetic oligonucleotide: CTLA4-833
gcccagaagauugaauaaaa

SEQ ID NO: 48073 - RNA, 21 nt, Artificial Sequence
  Synthetic oligonucleotide: CTLA4-2583
ugcccagaagauugaauaaaa

SEQ ID NO: 48074 - RNA, 22 nt, Artificial Sequence
  Synthetic oligonucleotide: CTLA4-2584
augcccagaagauugaauaaaa

SEQ ID NO: 48075 - RNA, 23 nt, Artificial Sequence
  Synthetic oligonucleotide: CTLA4-2585
gaugcccagaagauugaauaaaa

SEQ ID NO: 48076 - RNA, 24 nt, Artificial Sequence
  Synthetic oligonucleotide: CTLA4-2586
ggaugcccagaagauugaauaaaa

SEQ ID NO: 48077 - RNA, 18 nt, Artificial Sequence
  Synthetic oligonucleotide: CTLA4-2587
guuauccagauccucaaa

SEQ ID NO: 48078 - RNA, 19 nt, Artificial Sequence
  Synthetic oligonucleotide: CTLA4-2588
aguuauccagauccucaaa

SEQ ID NO: 48079 - RNA, 20 nt, Artificial Sequence
  Synthetic oligonucleotide: CTLA4-840
uaguuauccagauccucaaa

SEQ ID NO: 48080 - RNA, 21 nt, Artificial Sequence
  Synthetic oligonucleotide: CTLA4-2589
uuaguuauccagauccucaaa

SEQ ID NO: 48081 - RNA, 22 nt, Artificial Sequence
  Synthetic oligonucleotide: CTLA4-2590
cuuaguuauccagauccucaaa

SEQ ID NO: 48082 - RNA, 23 nt, Artificial Sequence
  Synthetic oligonucleotide: CTLA4-2591
acuuaguuauccagauccucaaa

SEQ ID NO: 48083 - RNA, 24 nt, Artificial Sequence
  Synthetic oligonucleotide: CTLA4-2592
cacuuaguuauccagauccucaaa

SEQ ID NO: 48084 - RNA, 18 nt, Artificial Sequence
  Synthetic oligonucleotide: CTLA4-2593
caaagagauagcucagaa

SEQ ID NO: 48085 - RNA, 19 nt, Artificial Sequence
  Synthetic oligonucleotide: CTLA4-2594
gcaaagagauagcucagaa

SEQ ID NO: 48086 - RNA, 20 nt, Artificial Sequence
  Synthetic oligonucleotide: CTLA4-874
ggcaaagagauagcucagaa

SEQ ID NO: 48087 - RNA, 21 nt, Artificial Sequence
  Synthetic oligonucleotide: CTLA4-2595
aggcaaagagauagcucagaa

SEQ ID NO: 48088 - RNA, 22 nt, Artificial Sequence
  Synthetic oligonucleotide: CTLA4-2596
aaggcaaagagauagcucagaa

SEQ ID NO: 48089 - RNA, 23 nt, Artificial Sequence
  Synthetic oligonucleotide: CTLA4-2597
uaaggcaaagagauagcucagaa

SEQ ID NO: 48090 - RNA, 24 nt, Artificial Sequence
  Synthetic oligonucleotide: CTLA4-2598
auaaggcaaagagauagcucagaa

SEQ ID NO: 48091 - RNA, 18 nt, Artificial Sequence
  Synthetic oligonucleotide: CTLA4-2599
aguugucaaugaaaugaa

SEQ ID NO: 48092 - RNA, 19 nt, Artificial Sequence
  Synthetic oligonucleotide: CTLA4-2600
gaguugucaaugaaaugaa

SEQ ID NO: 48093 - RNA, 20 nt, Artificial Sequence
  Synthetic oligonucleotide: CTLA4-828
ggaguugucaaugaaaugaa

SEQ ID NO: 48094 - RNA, 21 nt, Artificial Sequence
  Synthetic oligonucleotide: CTLA4-2601
uggaguugucaaugaaaugaa

SEQ ID NO: 48095 - RNA, 22 nt, Artificial Sequence
  Synthetic oligonucleotide: CTLA4-2602
uuggaguugucaaugaaaugaa

SEQ ID NO: 48096 - RNA, 23 nt, Artificial Sequence
  Synthetic oligonucleotide: CTLA4-2603
uuuggaguugucaaugaaaugaa

SEQ ID NO: 48097 - RNA, 24 nt, Artificial Sequence
  Synthetic oligonucleotide: CTLA4-2604
uuuuggaguugucaaugaaaugaa

SEQ ID NO: 48098 - RNA, 18 nt, Artificial Sequence
  Synthetic oligonucleotide: CTLA4-2605
uguauuccagggccagca

SEQ ID NO: 48099 - RNA, 19 nt, Artificial Sequence
  Synthetic oligonucleotide: CTLA4-2606
cuguauuccagggccagca

SEQ ID NO: 48100 - RNA, 20 nt, Artificial Sequence
  Synthetic oligonucleotide: CTLA4-505
ucuguauuccagggccagca

SEQ ID NO: 48101 - RNA, 21 nt, Artificial Sequence
  Synthetic oligonucleotide: CTLA4-2607
cucuguauuccagggccagca

SEQ ID NO: 48102 - RNA, 22 nt, Artificial Sequence
  Synthetic oligonucleotide: CTLA4-2608
gcucuguauuccagggccagca

SEQ ID NO: 48103 - RNA, 23 nt, Artificial Sequence
  Synthetic oligonucleotide: CTLA4-2609
ggcucuguauuccagggccagca

SEQ ID NO: 48104 - RNA, 24 nt, Artificial Sequence
  Synthetic oligonucleotide: CTLA4-2610
uggcucuguauuccagggccagca

SEQ ID NO: 48105 - RNA, 18 nt, Artificial Sequence
  Synthetic oligonucleotide: CTLA4-2611
gcggcagcaaauaaggca

SEQ ID NO: 48106 - RNA, 19 nt, Artificial Sequence
  Synthetic oligonucleotide: CTLA4-2612
ggcggcagcaaauaaggca

SEQ ID NO: 48107 - RNA, 20 nt, Artificial Sequence
  Synthetic oligonucleotide: CTLA4-872
gggcggcagcaaauaaggca

SEQ ID NO: 48108 - RNA, 21 nt, Artificial Sequence
  Synthetic oligonucleotide: CTLA4-2613
ugggcggcagcaaauaaggca

SEQ ID NO: 48109 - RNA, 22 nt, Artificial Sequence
  Synthetic oligonucleotide: CTLA4-2614
uugggcggcagcaaauaaggca

SEQ ID NO: 48110 - RNA, 23 nt, Artificial Sequence
  Synthetic oligonucleotide: CTLA4-2615
guugggcggcagcaaauaaggca

SEQ ID NO: 48111 - RNA, 24 nt, Artificial Sequence
  Synthetic oligonucleotide: CTLA4-2616
aguugggcggcagcaaauaaggca

SEQ ID NO: 48112 - RNA, 18 nt, Artificial Sequence
  Synthetic oligonucleotide: CTLA4-2617
uuauuuguaaagcuguca

SEQ ID NO: 48113 - RNA, 19 nt, Artificial Sequence
  Synthetic oligonucleotide: CTLA4-2618
cuuauuuguaaagcuguca

SEQ ID NO: 48114 - RNA, 20 nt, Artificial Sequence
  Synthetic oligonucleotide: CTLA4-699
acuuauuuguaaagcuguca

SEQ ID NO: 48115 - RNA, 21 nt, Artificial Sequence
  Synthetic oligonucleotide: CTLA4-2619
aacuuauuuguaaagcuguca

SEQ ID NO: 48116 - RNA, 22 nt, Artificial Sequence
  Synthetic oligonucleotide: CTLA4-2620
aaacuuauuuguaaagcuguca

SEQ ID NO: 48117 - RNA, 23 nt, Artificial Sequence
  Synthetic oligonucleotide: CTLA4-2621
uaaacuuauuuguaaagcuguca

SEQ ID NO: 48118 - RNA, 24 nt, Artificial Sequence
  Synthetic oligonucleotide: CTLA4-2622
auaaacuuauuuguaaagcuguca

SEQ ID NO: 48119 - RNA, 18 nt, Artificial Sequence
  Synthetic oligonucleotide: CTLA4-2623
guaguuuuggaguuguca

SEQ ID NO: 48120 - RNA, 19 nt, Artificial Sequence
  Synthetic oligonucleotide: CTLA4-2624
aguaguuuuggaguuguca

SEQ ID NO: 48121 - RNA, 20 nt, Artificial Sequence
  Synthetic oligonucleotide: CTLA4-826
uaguaguuuuggaguuguca

SEQ ID NO: 48122 - RNA, 21 nt, Artificial Sequence
  Synthetic oligonucleotide: CTLA4-2625
cuaguaguuuuggaguuguca

SEQ ID NO: 48123 - RNA, 22 nt, Artificial Sequence
  Synthetic oligonucleotide: CTLA4-2626
ccuaguaguuuuggaguuguca

SEQ ID NO: 48124 - RNA, 23 nt, Artificial Sequence
  Synthetic oligonucleotide: CTLA4-2627
gccuaguaguuuuggaguuguca

SEQ ID NO: 48125 - RNA, 24 nt, Artificial Sequence
  Synthetic oligonucleotide: CTLA4-2628
agccuaguaguuuuggaguuguca

SEQ ID NO: 48126 - RNA, 18 nt, Artificial Sequence
  Synthetic oligonucleotide: CTLA4-2629
acuuuuggagcaugaaga

SEQ ID NO: 48127 - RNA, 19 nt, Artificial Sequence
  Synthetic oligonucleotide: CTLA4-2630
gacuuuuggagcaugaaga

SEQ ID NO: 48128 - RNA, 20 nt, Artificial Sequence
  Synthetic oligonucleotide: CTLA4-10
agacuuuuggagcaugaaga

SEQ ID NO: 48129 - RNA, 21 nt, Artificial Sequence
  Synthetic oligonucleotide: CTLA4-2631
gagacuuuuggagcaugaaga

SEQ ID NO: 48130 - RNA, 22 nt, Artificial Sequence
  Synthetic oligonucleotide: CTLA4-2632
ugagacuuuuggagcaugaaga

SEQ ID NO: 48131 - RNA, 23 nt, Artificial Sequence
  Synthetic oligonucleotide: CTLA4-2633
gugagacuuuuggagcaugaaga

SEQ ID NO: 48132 - RNA, 24 nt, Artificial Sequence
  Synthetic oligonucleotide: CTLA4-2634
agugagacuuuuggagcaugaaga

SEQ ID NO: 48133 - RNA, 18 nt, Artificial Sequence
  Synthetic oligonucleotide: CTLA4-1703
ugucuucugcaaagguga

SEQ ID NO: 48134 - RNA, 19 nt, Artificial Sequence
  Synthetic oligonucleotide: CTLA4-1704
cugucuucugcaaagguga

SEQ ID NO: 48135 - RNA, 20 nt, Artificial Sequence
  Synthetic oligonucleotide: CTLA4-220
ccugucuucugcaaagguga

SEQ ID NO: 48136 - RNA, 21 nt, Artificial Sequence
  Synthetic oligonucleotide: CTLA4-1705
cccugucuucugcaaagguga

SEQ ID NO: 48137 - RNA, 22 nt, Artificial Sequence
  Synthetic oligonucleotide: CTLA4-1706
ucccugucuucugcaaagguga

SEQ ID NO: 48138 - RNA, 23 nt, Artificial Sequence
  Synthetic oligonucleotide: CTLA4-1707
aucccugucuucugcaaagguga

SEQ ID NO: 48139 - RNA, 24 nt, Artificial Sequence
  Synthetic oligonucleotide: CTLA4-1708
caucccugucuucugcaaagguga

SEQ ID NO: 48140 - RNA, 18 nt, Artificial Sequence
  Synthetic oligonucleotide: CTLA4-2635
cagauccucaaagugaac

SEQ ID NO: 48141 - RNA, 19 nt, Artificial Sequence
  Synthetic oligonucleotide: CTLA4-2636
ccagauccucaaagugaac

SEQ ID NO: 48142 - RNA, 20 nt, Artificial Sequence
  Synthetic oligonucleotide: CTLA4-841
uccagauccucaaagugaac

SEQ ID NO: 48143 - RNA, 21 nt, Artificial Sequence
  Synthetic oligonucleotide: CTLA4-2637
auccagauccucaaagugaac

SEQ ID NO: 48144 - RNA, 22 nt, Artificial Sequence
  Synthetic oligonucleotide: CTLA4-2638
uauccagauccucaaagugaac

SEQ ID NO: 48145 - RNA, 23 nt, Artificial Sequence
  Synthetic oligonucleotide: CTLA4-2639
uuauccagauccucaaagugaac

SEQ ID NO: 48146 - RNA, 24 nt, Artificial Sequence
  Synthetic oligonucleotide: CTLA4-2640
guuauccagauccucaaagugaac

SEQ ID NO: 48147 - RNA, 18 nt, Artificial Sequence
  Synthetic oligonucleotide: CTLA4-2641
gcucuacuuccugaagac

SEQ ID NO: 48148 - RNA, 19 nt, Artificial Sequence
  Synthetic oligonucleotide: CTLA4-2642
ugcucuacuuccugaagac

SEQ ID NO: 48149 - RNA, 20 nt, Artificial Sequence
  Synthetic oligonucleotide: CTLA4-852
uugcucuacuuccugaagac

SEQ ID NO: 48150 - RNA, 21 nt, Artificial Sequence
  Synthetic oligonucleotide: CTLA4-2643
uuugcucuacuuccugaagac

SEQ ID NO: 48151 - RNA, 22 nt, Artificial Sequence
  Synthetic oligonucleotide: CTLA4-2644
uuuugcucuacuuccugaagac

SEQ ID NO: 48152 - RNA, 23 nt, Artificial Sequence
  Synthetic oligonucleotide: CTLA4-2645
guuuugcucuacuuccugaagac

SEQ ID NO: 48153 - RNA, 24 nt, Artificial Sequence
  Synthetic oligonucleotide: CTLA4-2646
gguuuugcucuacuuccugaagac

SEQ ID NO: 48154 - RNA, 18 nt, Artificial Sequence
  Synthetic oligonucleotide: CTLA4-1728
ucagcugaaccuggcuac

SEQ ID NO: 48155 - RNA, 19 nt, Artificial Sequence
  Synthetic oligonucleotide: CTLA4-1729
cucagcugaaccuggcuac

SEQ ID NO: 48156 - RNA, 20 nt, Artificial Sequence
  Synthetic oligonucleotide: CTLA4-218
gcucagcugaaccuggcuac

SEQ ID NO: 48157 - RNA, 21 nt, Artificial Sequence
  Synthetic oligonucleotide: CTLA4-1730
ggcucagcugaaccuggcuac

SEQ ID NO: 48158 - RNA, 22 nt, Artificial Sequence
  Synthetic oligonucleotide: CTLA4-1731
aggcucagcugaaccuggcuac

SEQ ID NO: 48159 - RNA, 23 nt, Artificial Sequence
  Synthetic oligonucleotide: CTLA4-1732
aaggcucagcugaaccuggcuac

SEQ ID NO: 48160 - RNA, 24 nt, Artificial Sequence
  Synthetic oligonucleotide: CTLA4-1733
caaggcucagcugaaccuggcuac

SEQ ID NO: 48161 - RNA, 18 nt, Artificial Sequence
  Synthetic oligonucleotide: CTLA4-2647
aaauccugccauuagccc

SEQ ID NO: 48162 - RNA, 19 nt, Artificial Sequence
  Synthetic oligonucleotide: CTLA4-2648
caaauccugccauuagccc

SEQ ID NO: 48163 - RNA, 20 nt, Artificial Sequence
  Synthetic oligonucleotide: CTLA4-822
acaaauccugccauuagccc

SEQ ID NO: 48164 - RNA, 21 nt, Artificial Sequence
  Synthetic oligonucleotide: CTLA4-2649
gacaaauccugccauuagccc

SEQ ID NO: 48165 - RNA, 22 nt, Artificial Sequence
  Synthetic oligonucleotide: CTLA4-2650
agacaaauccugccauuagccc

SEQ ID NO: 48166 - RNA, 23 nt, Artificial Sequence
  Synthetic oligonucleotide: CTLA4-2651
uagacaaauccugccauuagccc

SEQ ID NO: 48167 - RNA, 24 nt, Artificial Sequence
  Synthetic oligonucleotide: CTLA4-2652
cuagacaaauccugccauuagccc

SEQ ID NO: 48168 - RNA, 18 nt, Artificial Sequence
  Synthetic oligonucleotide: CTLA4-2653
uggaugguuaaggaugcc

SEQ ID NO: 48169 - RNA, 19 nt, Artificial Sequence
  Synthetic oligonucleotide: CTLA4-2654
cuggaugguuaaggaugcc

SEQ ID NO: 48170 - RNA, 20 nt, Artificial Sequence
  Synthetic oligonucleotide: CTLA4-831
acuggaugguuaaggaugcc

SEQ ID NO: 48171 - RNA, 21 nt, Artificial Sequence
  Synthetic oligonucleotide: CTLA4-2655
gacuggaugguuaaggaugcc

SEQ ID NO: 48172 - RNA, 22 nt, Artificial Sequence
  Synthetic oligonucleotide: CTLA4-2656
ggacuggaugguuaaggaugcc

SEQ ID NO: 48173 - RNA, 23 nt, Artificial Sequence
  Synthetic oligonucleotide: CTLA4-2657
uggacuggaugguuaaggaugcc

SEQ ID NO: 48174 - RNA, 24 nt, Artificial Sequence
  Synthetic oligonucleotide: CTLA4-2658
uuggacuggaugguuaaggaugcc

SEQ ID NO: 48175 - RNA, 18 nt, Artificial Sequence
  Synthetic oligonucleotide: CTLA4-2659
ggaggacccuuguacucc

SEQ ID NO: 48176 - RNA, 19 nt, Artificial Sequence
  Synthetic oligonucleotide: CTLA4-2660
aggaggacccuuguacucc

SEQ ID NO: 48177 - RNA, 20 nt, Artificial Sequence
  Synthetic oligonucleotide: CTLA4-471
uaggaggacccuuguacucc

SEQ ID NO: 48178 - RNA, 21 nt, Artificial Sequence
  Synthetic oligonucleotide: CTLA4-2661
uuaggaggacccuuguacucc

SEQ ID NO: 48179 - RNA, 22 nt, Artificial Sequence
  Synthetic oligonucleotide: CTLA4-2662
uuuaggaggacccuuguacucc

SEQ ID NO: 48180 - RNA, 23 nt, Artificial Sequence
  Synthetic oligonucleotide: CTLA4-2663
auuuaggaggacccuuguacucc

SEQ ID NO: 48181 - RNA, 24 nt, Artificial Sequence
  Synthetic oligonucleotide: CTLA4-2664
gauuuaggaggacccuuguacucc

SEQ ID NO: 48182 - RNA, 18 nt, Artificial Sequence
  Synthetic oligonucleotide: CTLA4-2665
agugauuuauagcaaagc

SEQ ID NO: 48183 - RNA, 19 nt, Artificial Sequence
  Synthetic oligonucleotide: CTLA4-2666
cagugauuuauagcaaagc

SEQ ID NO: 48184 - RNA, 20 nt, Artificial Sequence
  Synthetic oligonucleotide: CTLA4-866
gcagugauuuauagcaaagc

SEQ ID NO: 48185 - RNA, 21 nt, Artificial Sequence
  Synthetic oligonucleotide: CTLA4-2667
ggcagugauuuauagcaaagc

SEQ ID NO: 48186 - RNA, 22 nt, Artificial Sequence
  Synthetic oligonucleotide: CTLA4-2668
aggcagugauuuauagcaaagc

SEQ ID NO: 48187 - RNA, 23 nt, Artificial Sequence
  Synthetic oligonucleotide: CTLA4-2669
aaggcagugauuuauagcaaagc

SEQ ID NO: 48188 - RNA, 24 nt, Artificial Sequence
  Synthetic oligonucleotide: CTLA4-2670
aaaggcagugauuuauagcaaagc

SEQ ID NO: 48189 - RNA, 18 nt, Artificial Sequence
  Synthetic oligonucleotide: CTLA4-2671
cuguauuccagggccagc

SEQ ID NO: 48190 - RNA, 19 nt, Artificial Sequence
  Synthetic oligonucleotide: CTLA4-2672
ucuguauuccagggccagc

SEQ ID NO: 48191 - RNA, 20 nt, Artificial Sequence
  Synthetic oligonucleotide: CTLA4-504
cucuguauuccagggccagc

SEQ ID NO: 48192 - RNA, 21 nt, Artificial Sequence
  Synthetic oligonucleotide: CTLA4-2673
gcucuguauuccagggccagc

SEQ ID NO: 48193 - RNA, 22 nt, Artificial Sequence
  Synthetic oligonucleotide: CTLA4-2674
ggcucuguauuccagggccagc

SEQ ID NO: 48194 - RNA, 23 nt, Artificial Sequence
  Synthetic oligonucleotide: CTLA4-2675
uggcucuguauuccagggccagc

SEQ ID NO: 48195 - RNA, 24 nt, Artificial Sequence
  Synthetic oligonucleotide: CTLA4-2676
cuggcucuguauuccagggccagc

SEQ ID NO: 48196 - RNA, 18 nt, Artificial Sequence
  Synthetic oligonucleotide: CTLA4-1746
gagugagacuuuuggagc

SEQ ID NO: 48197 - RNA, 19 nt, Artificial Sequence
  Synthetic oligonucleotide: CTLA4-1747
ugagugagacuuuuggagc

SEQ ID NO: 48198 - RNA, 20 nt, Artificial Sequence
  Synthetic oligonucleotide: CTLA4-223
gugagugagacuuuuggagc

SEQ ID NO: 48199 - RNA, 21 nt, Artificial Sequence
  Synthetic oligonucleotide: CTLA4-1748
ggugagugagacuuuuggagc

SEQ ID NO: 48200 - RNA, 22 nt, Artificial Sequence
  Synthetic oligonucleotide: CTLA4-1749
aggugagugagacuuuuggagc

SEQ ID NO: 48201 - RNA, 23 nt, Artificial Sequence
  Synthetic oligonucleotide: CTLA4-1750
aaggugagugagacuuuuggagc

SEQ ID NO: 48202 - RNA, 24 nt, Artificial Sequence
  Synthetic oligonucleotide: CTLA4-1751
aaaggugagugagacuuuuggagc

SEQ ID NO: 48203 - RNA, 18 nt, Artificial Sequence
  Synthetic oligonucleotide: CTLA4-2677
uuuuguucaguugagugc

SEQ ID NO: 48204 - RNA, 19 nt, Artificial Sequence
  Synthetic oligonucleotide: CTLA4-2678
guuuuguucaguugagugc

SEQ ID NO: 48205 - RNA, 20 nt, Artificial Sequence
  Synthetic oligonucleotide: CTLA4-845
uguuuuguucaguugagugc

SEQ ID NO: 48206 - RNA, 21 nt, Artificial Sequence
  Synthetic oligonucleotide: CTLA4-2679
uuguuuuguucaguugagugc

SEQ ID NO: 48207 - RNA, 22 nt, Artificial Sequence
  Synthetic oligonucleotide: CTLA4-2680
cuuguuuuguucaguugagugc

SEQ ID NO: 48208 - RNA, 23 nt, Artificial Sequence
  Synthetic oligonucleotide: CTLA4-2681
gcuuguuuuguucaguugagugc

SEQ ID NO: 48209 - RNA, 24 nt, Artificial Sequence
  Synthetic oligonucleotide: CTLA4-2682
ggcuuguuuuguucaguugagugc

SEQ ID NO: 48210 - RNA, 18 nt, Artificial Sequence
  Synthetic oligonucleotide: CTLA4-2683
uuucaaagcuucaggauc

SEQ ID NO: 48211 - RNA, 19 nt, Artificial Sequence
  Synthetic oligonucleotide: CTLA4-2684
auuucaaagcuucaggauc

SEQ ID NO: 48212 - RNA, 20 nt, Artificial Sequence
  Synthetic oligonucleotide: CTLA4-850
cauuucaaagcuucaggauc

SEQ ID NO: 48213 - RNA, 21 nt, Artificial Sequence
  Synthetic oligonucleotide: CTLA4-2685
acauuucaaagcuucaggauc

SEQ ID NO: 48214 - RNA, 22 nt, Artificial Sequence
  Synthetic oligonucleotide: CTLA4-2686
cacauuucaaagcuucaggauc

SEQ ID NO: 48215 - RNA, 23 nt, Artificial Sequence
  Synthetic oligonucleotide: CTLA4-2687
acacauuucaaagcuucaggauc

SEQ ID NO: 48216 - RNA, 24 nt, Artificial Sequence
  Synthetic oligonucleotide: CTLA4-2688
aacacauuucaaagcuucaggauc

SEQ ID NO: 48217 - RNA, 18 nt, Artificial Sequence
  Synthetic oligonucleotide: CTLA4-2689
aggaggacccuuguacuc

SEQ ID NO: 48218 - RNA, 19 nt, Artificial Sequence
  Synthetic oligonucleotide: CTLA4-2690
uaggaggacccuuguacuc

SEQ ID NO: 48219 - RNA, 20 nt, Artificial Sequence
  Synthetic oligonucleotide: CTLA4-838
uuaggaggacccuuguacuc

SEQ ID NO: 48220 - RNA, 21 nt, Artificial Sequence
  Synthetic oligonucleotide: CTLA4-2691
uuuaggaggacccuuguacuc

SEQ ID NO: 48221 - RNA, 22 nt, Artificial Sequence
  Synthetic oligonucleotide: CTLA4-2692
auuuaggaggacccuuguacuc

SEQ ID NO: 48222 - RNA, 23 nt, Artificial Sequence
  Synthetic oligonucleotide: CTLA4-2693
gauuuaggaggacccuuguacuc

SEQ ID NO: 48223 - RNA, 24 nt, Artificial Sequence
  Synthetic oligonucleotide: CTLA4-2694
ggauuuaggaggacccuuguacuc

SEQ ID NO: 48224 - RNA, 18 nt, Artificial Sequence
  Synthetic oligonucleotide: CTLA4-2695
cuuauuuguaaagcuguc

SEQ ID NO: 48225 - RNA, 19 nt, Artificial Sequence
  Synthetic oligonucleotide: CTLA4-2696
acuuauuuguaaagcuguc

SEQ ID NO: 48226 - RNA, 20 nt, Artificial Sequence
  Synthetic oligonucleotide: CTLA4-1134
aacuuauuuguaaagcuguc

SEQ ID NO: 48227 - RNA, 21 nt, Artificial Sequence
  Synthetic oligonucleotide: CTLA4-2697
aaacuuauuuguaaagcuguc

SEQ ID NO: 48228 - RNA, 22 nt, Artificial Sequence
  Synthetic oligonucleotide: CTLA4-2698
uaaacuuauuuguaaagcuguc

SEQ ID NO: 48229 - RNA, 23 nt, Artificial Sequence
  Synthetic oligonucleotide: CTLA4-2699
auaaacuuauuuguaaagcuguc

SEQ ID NO: 48230 - RNA, 24 nt, Artificial Sequence
  Synthetic oligonucleotide: CTLA4-2700
aauaaacuuauuuguaaagcuguc

SEQ ID NO: 48231 - RNA, 18 nt, Artificial Sequence
  Synthetic oligonucleotide: CTLA4-2701
uuggcuggcucuguauuc

SEQ ID NO: 48232 - RNA, 19 nt, Artificial Sequence
  Synthetic oligonucleotide: CTLA4-2702
cuuggcuggcucuguauuc

SEQ ID NO: 48233 - RNA, 20 nt, Artificial Sequence
  Synthetic oligonucleotide: CTLA4-867
gcuuggcuggcucuguauuc

SEQ ID NO: 48234 - RNA, 21 nt, Artificial Sequence
  Synthetic oligonucleotide: CTLA4-2703
ggcuuggcuggcucuguauuc

SEQ ID NO: 48235 - RNA, 22 nt, Artificial Sequence
  Synthetic oligonucleotide: CTLA4-2704
uggcuuggcuggcucuguauuc

SEQ ID NO: 48236 - RNA, 23 nt, Artificial Sequence
  Synthetic oligonucleotide: CTLA4-2705
cuggcuuggcuggcucuguauuc

SEQ ID NO: 48237 - RNA, 24 nt, Artificial Sequence
  Synthetic oligonucleotide: CTLA4-2706
ucuggcuuggcuggcucuguauuc

SEQ ID NO: 48238 - RNA, 18 nt, Artificial Sequence
  Synthetic oligonucleotide: CTLA4-2707
aagguuuugcucuacuuc

SEQ ID NO: 48239 - RNA, 19 nt, Artificial Sequence
  Synthetic oligonucleotide: CTLA4-2708
aaagguuuugcucuacuuc

SEQ ID NO: 48240 - RNA, 20 nt, Artificial Sequence
  Synthetic oligonucleotide: CTLA4-851
gaaagguuuugcucuacuuc

SEQ ID NO: 48241 - RNA, 21 nt, Artificial Sequence
  Synthetic oligonucleotide: CTLA4-2709
ugaaagguuuugcucuacuuc

SEQ ID NO: 48242 - RNA, 22 nt, Artificial Sequence
  Synthetic oligonucleotide: CTLA4-2710
cugaaagguuuugcucuacuuc

SEQ ID NO: 48243 - RNA, 23 nt, Artificial Sequence
  Synthetic oligonucleotide: CTLA4-2711
ccugaaagguuuugcucuacuuc

SEQ ID NO: 48244 - RNA, 24 nt, Artificial Sequence
  Synthetic oligonucleotide: CTLA4-2712
uccugaaagguuuugcucuacuuc

SEQ ID NO: 48245 - RNA, 18 nt, Artificial Sequence
  Synthetic oligonucleotide: CTLA4-2713
gacuuuuggagcaugaag

SEQ ID NO: 48246 - RNA, 19 nt, Artificial Sequence
  Synthetic oligonucleotide: CTLA4-2714
agacuuuuggagcaugaag

SEQ ID NO: 48247 - RNA, 20 nt, Artificial Sequence
  Synthetic oligonucleotide: CTLA4-861
gagacuuuuggagcaugaag

SEQ ID NO: 48248 - RNA, 21 nt, Artificial Sequence
  Synthetic oligonucleotide: CTLA4-2715
ugagacuuuuggagcaugaag

SEQ ID NO: 48249 - RNA, 22 nt, Artificial Sequence
  Synthetic oligonucleotide: CTLA4-2716
gugagacuuuuggagcaugaag

SEQ ID NO: 48250 - RNA, 23 nt, Artificial Sequence
  Synthetic oligonucleotide: CTLA4-2717
agugagacuuuuggagcaugaag

SEQ ID NO: 48251 - RNA, 24 nt, Artificial Sequence
  Synthetic oligonucleotide: CTLA4-2718
gagugagacuuuuggagcaugaag

SEQ ID NO: 48252 - RNA, 18 nt, Artificial Sequence
  Synthetic oligonucleotide: CTLA4-2719
ucuguauuccagggccag

SEQ ID NO: 48253 - RNA, 19 nt, Artificial Sequence
  Synthetic oligonucleotide: CTLA4-2720
cucuguauuccagggccag

SEQ ID NO: 48254 - RNA, 20 nt, Artificial Sequence
  Synthetic oligonucleotide: CTLA4-868
gcucuguauuccagggccag

SEQ ID NO: 48255 - RNA, 21 nt, Artificial Sequence
  Synthetic oligonucleotide: CTLA4-2721
ggcucuguauuccagggccag

SEQ ID NO: 48256 - RNA, 22 nt, Artificial Sequence
  Synthetic oligonucleotide: CTLA4-2722
uggcucuguauuccagggccag

SEQ ID NO: 48257 - RNA, 23 nt, Artificial Sequence
  Synthetic oligonucleotide: CTLA4-2723
cuggcucuguauuccagggccag

SEQ ID NO: 48258 - RNA, 24 nt, Artificial Sequence
  Synthetic oligonucleotide: CTLA4-2724
gcuggcucuguauuccagggccag

SEQ ID NO: 48259 - RNA, 18 nt, Artificial Sequence
  Synthetic oligonucleotide: CTLA4-2725
agggccagcagggagcag

SEQ ID NO: 48260 - RNA, 19 nt, Artificial Sequence
  Synthetic oligonucleotide: CTLA4-2726
cagggccagcagggagcag

SEQ ID NO: 48261 - RNA, 20 nt, Artificial Sequence
  Synthetic oligonucleotide: CTLA4-871
ccagggccagcagggagcag

SEQ ID NO: 48262 - RNA, 21 nt, Artificial Sequence
  Synthetic oligonucleotide: CTLA4-2727
uccagggccagcagggagcag

SEQ ID NO: 48263 - RNA, 22 nt, Artificial Sequence
  Synthetic oligonucleotide: CTLA4-2728
uuccagggccagcagggagcag

SEQ ID NO: 48264 - RNA, 23 nt, Artificial Sequence
  Synthetic oligonucleotide: CTLA4-2729
auuccagggccagcagggagcag

SEQ ID NO: 48265 - RNA, 24 nt, Artificial Sequence
  Synthetic oligonucleotide: CTLA4-2730
uauuccagggccagcagggagcag

SEQ ID NO: 48266 - RNA, 18 nt, Artificial Sequence
  Synthetic oligonucleotide: CTLA4-1776
cagcggcacaaggcucag

SEQ ID NO: 48267 - RNA, 19 nt, Artificial Sequence
  Synthetic oligonucleotide: CTLA4-1777
ucagcggcacaaggcucag

SEQ ID NO: 48268 - RNA, 20 nt, Artificial Sequence
  Synthetic oligonucleotide: CTLA4-217
uucagcggcacaaggcucag

SEQ ID NO: 48269 - RNA, 21 nt, Artificial Sequence
  Synthetic oligonucleotide: CTLA4-1778
uuucagcggcacaaggcucag

SEQ ID NO: 48270 - RNA, 22 nt, Artificial Sequence
  Synthetic oligonucleotide: CTLA4-1779
auuucagcggcacaaggcucag

SEQ ID NO: 48271 - RNA, 23 nt, Artificial Sequence
  Synthetic oligonucleotide: CTLA4-1780
gauuucagcggcacaaggcucag

SEQ ID NO: 48272 - RNA, 24 nt, Artificial Sequence
  Synthetic oligonucleotide: CTLA4-1781
ggauuucagcggcacaaggcucag

SEQ ID NO: 48273 - RNA, 18 nt, Artificial Sequence
  Synthetic oligonucleotide: CTLA4-2731
aauaaaauugggauuuag

SEQ ID NO: 48274 - RNA, 19 nt, Artificial Sequence
  Synthetic oligonucleotide: CTLA4-2732
gaauaaaauugggauuuag

SEQ ID NO: 48275 - RNA, 20 nt, Artificial Sequence
  Synthetic oligonucleotide: CTLA4-837
ugaauaaaauugggauuuag

SEQ ID NO: 48276 - RNA, 21 nt, Artificial Sequence
  Synthetic oligonucleotide: CTLA4-2733
uugaauaaaauugggauuuag

SEQ ID NO: 48277 - RNA, 22 nt, Artificial Sequence
  Synthetic oligonucleotide: CTLA4-2734
auugaauaaaauugggauuuag

SEQ ID NO: 48278 - RNA, 23 nt, Artificial Sequence
  Synthetic oligonucleotide: CTLA4-2735
gauugaauaaaauugggauuuag

SEQ ID NO: 48279 - RNA, 24 nt, Artificial Sequence
  Synthetic oligonucleotide: CTLA4-2736
agauugaauaaaauugggauuuag

SEQ ID NO: 48280 - RNA, 18 nt, Artificial Sequence
  Synthetic oligonucleotide: CTLA4-2737
aaugcuaaauggauuuag

SEQ ID NO: 48281 - RNA, 19 nt, Artificial Sequence
  Synthetic oligonucleotide: CTLA4-2738
aaaugcuaaauggauuuag

SEQ ID NO: 48282 - RNA, 20 nt, Artificial Sequence
  Synthetic oligonucleotide: CTLA4-1133
caaaugcuaaauggauuuag

SEQ ID NO: 48283 - RNA, 21 nt, Artificial Sequence
  Synthetic oligonucleotide: CTLA4-2739
ccaaaugcuaaauggauuuag

SEQ ID NO: 48284 - RNA, 22 nt, Artificial Sequence
  Synthetic oligonucleotide: CTLA4-2740
accaaaugcuaaauggauuuag

SEQ ID NO: 48285 - RNA, 23 nt, Artificial Sequence
  Synthetic oligonucleotide: CTLA4-2741
aaccaaaugcuaaauggauuuag

SEQ ID NO: 48286 - RNA, 24 nt, Artificial Sequence
  Synthetic oligonucleotide: CTLA4-2742
uaaccaaaugcuaaauggauuuag

SEQ ID NO: 48287 - RNA, 18 nt, Artificial Sequence
  Synthetic oligonucleotide: CTLA4-2743
agagcgccagguauuuag

SEQ ID NO: 48288 - RNA, 19 nt, Artificial Sequence
  Synthetic oligonucleotide: CTLA4-2744
cagagcgccagguauuuag

SEQ ID NO: 48289 - RNA, 20 nt, Artificial Sequence
  Synthetic oligonucleotide: CTLA4-875
acagagcgccagguauuuag

SEQ ID NO: 48290 - RNA, 21 nt, Artificial Sequence
  Synthetic oligonucleotide: CTLA4-2745
aacagagcgccagguauuuag

SEQ ID NO: 48291 - RNA, 22 nt, Artificial Sequence
  Synthetic oligonucleotide: CTLA4-2746
gaacagagcgccagguauuuag

SEQ ID NO: 48292 - RNA, 23 nt, Artificial Sequence
  Synthetic oligonucleotide: CTLA4-2747
agaacagagcgccagguauuuag

SEQ ID NO: 48293 - RNA, 24 nt, Artificial Sequence
  Synthetic oligonucleotide: CTLA4-2748
cagaacagagcgccagguauuuag

SEQ ID NO: 48294 - RNA, 18 nt, Artificial Sequence
  Synthetic oligonucleotide: CTLA4-2749
uuuggagcaugaagaugg

SEQ ID NO: 48295 - RNA, 19 nt, Artificial Sequence
  Synthetic oligonucleotide: CTLA4-2750
uuuuggagcaugaagaugg

SEQ ID NO: 48296 - RNA, 20 nt, Artificial Sequence
  Synthetic oligonucleotide: CTLA4-493
cuuuuggagcaugaagaugg

SEQ ID NO: 48297 - RNA, 21 nt, Artificial Sequence
  Synthetic oligonucleotide: CTLA4-2751
acuuuuggagcaugaagaugg

SEQ ID NO: 48298 - RNA, 22 nt, Artificial Sequence
  Synthetic oligonucleotide: CTLA4-2752
gacuuuuggagcaugaagaugg

SEQ ID NO: 48299 - RNA, 23 nt, Artificial Sequence
  Synthetic oligonucleotide: CTLA4-2753
agacuuuuggagcaugaagaugg

SEQ ID NO: 48300 - RNA, 24 nt, Artificial Sequence
  Synthetic oligonucleotide: CTLA4-2754
gagacuuuuggagcaugaagaugg

SEQ ID NO: 48301 - RNA, 18 nt, Artificial Sequence
  Synthetic oligonucleotide: CTLA4-2755
uuuuggagcaugaagaug

SEQ ID NO: 48302 - RNA, 19 nt, Artificial Sequence
  Synthetic oligonucleotide: CTLA4-2756
cuuuuggagcaugaagaug

SEQ ID NO: 48303 - RNA, 20 nt, Artificial Sequence
  Synthetic oligonucleotide: CTLA4-863
acuuuuggagcaugaagaug

SEQ ID NO: 48304 - RNA, 21 nt, Artificial Sequence
  Synthetic oligonucleotide: CTLA4-2757
gacuuuuggagcaugaagaug

SEQ ID NO: 48305 - RNA, 22 nt, Artificial Sequence
  Synthetic oligonucleotide: CTLA4-2758
agacuuuuggagcaugaagaug

SEQ ID NO: 48306 - RNA, 23 nt, Artificial Sequence
  Synthetic oligonucleotide: CTLA4-2759
gagacuuuuggagcaugaagaug

SEQ ID NO: 48307 - RNA, 24 nt, Artificial Sequence
  Synthetic oligonucleotide: CTLA4-2760
ugagacuuuuggagcaugaagaug

SEQ ID NO: 48308 - RNA, 18 nt, Artificial Sequence
  Synthetic oligonucleotide: CTLA4-2761
aagcugucaagggaccau

SEQ ID NO: 48309 - RNA, 19 nt, Artificial Sequence
  Synthetic oligonucleotide: CTLA4-2762
aaagcugucaagggaccau

SEQ ID NO: 48310 - RNA, 20 nt, Artificial Sequence
  Synthetic oligonucleotide: CTLA4-1136
uaaagcugucaagggaccau

SEQ ID NO: 48311 - RNA, 21 nt, Artificial Sequence
  Synthetic oligonucleotide: CTLA4-2763
guaaagcugucaagggaccau

SEQ ID NO: 48312 - RNA, 22 nt, Artificial Sequence
  Synthetic oligonucleotide: CTLA4-2764
uguaaagcugucaagggaccau

SEQ ID NO: 48313 - RNA, 23 nt, Artificial Sequence
  Synthetic oligonucleotide: CTLA4-2765
uuguaaagcugucaagggaccau

SEQ ID NO: 48314 - RNA, 24 nt, Artificial Sequence
  Synthetic oligonucleotide: CTLA4-2766
uuuguaaagcugucaagggaccau

SEQ ID NO: 48315 - RNA, 18 nt, Artificial Sequence
  Synthetic oligonucleotide: CTLA4-2767
cacauguguaauacauau

SEQ ID NO: 48316 - RNA, 19 nt, Artificial Sequence
  Synthetic oligonucleotide: CTLA4-2768
gcacauguguaauacauau

SEQ ID NO: 48317 - RNA, 20 nt, Artificial Sequence
  Synthetic oligonucleotide: CTLA4-846
ugcacauguguaauacauau

SEQ ID NO: 48318 - RNA, 21 nt, Artificial Sequence
  Synthetic oligonucleotide: CTLA4-2769
gugcacauguguaauacauau

SEQ ID NO: 48319 - RNA, 22 nt, Artificial Sequence
  Synthetic oligonucleotide: CTLA4-2770
ugugcacauguguaauacauau

SEQ ID NO: 48320 - RNA, 23 nt, Artificial Sequence
  Synthetic oligonucleotide: CTLA4-2771
gugugcacauguguaauacauau

SEQ ID NO: 48321 - RNA, 24 nt, Artificial Sequence
  Synthetic oligonucleotide: CTLA4-2772
ugugugcacauguguaauacauau

SEQ ID NO: 48322 - RNA, 18 nt, Artificial Sequence
  Synthetic oligonucleotide: CTLA4-2773
uaaggcaaagagauagcu

SEQ ID NO: 48323 - RNA, 19 nt, Artificial Sequence
  Synthetic oligonucleotide: CTLA4-2774
auaaggcaaagagauagcu

SEQ ID NO: 48324 - RNA, 20 nt, Artificial Sequence
  Synthetic oligonucleotide: CTLA4-873
aauaaggcaaagagauagcu

SEQ ID NO: 48325 - RNA, 21 nt, Artificial Sequence
  Synthetic oligonucleotide: CTLA4-2775
aaauaaggcaaagagauagcu

SEQ ID NO: 48326 - RNA, 22 nt, Artificial Sequence
  Synthetic oligonucleotide: CTLA4-2776
caaauaaggcaaagagauagcu

SEQ ID NO: 48327 - RNA, 23 nt, Artificial Sequence
  Synthetic oligonucleotide: CTLA4-2777
gcaaauaaggcaaagagauagcu

SEQ ID NO: 48328 - RNA, 24 nt, Artificial Sequence
  Synthetic oligonucleotide: CTLA4-2778
agcaaauaaggcaaagagauagcu

SEQ ID NO: 48329 - RNA, 18 nt, Artificial Sequence
  Synthetic oligonucleotide: CTLA4-2779
gccauuagcccaagggcu

SEQ ID NO: 48330 - RNA, 19 nt, Artificial Sequence
  Synthetic oligonucleotide: CTLA4-2780
ugccauuagcccaagggcu

SEQ ID NO: 48331 - RNA, 20 nt, Artificial Sequence
  Synthetic oligonucleotide: CTLA4-823
cugccauuagcccaagggcu

SEQ ID NO: 48332 - RNA, 21 nt, Artificial Sequence
  Synthetic oligonucleotide: CTLA4-2781
ccugccauuagcccaagggcu

SEQ ID NO: 48333 - RNA, 22 nt, Artificial Sequence
  Synthetic oligonucleotide: CTLA4-2782
uccugccauuagcccaagggcu

SEQ ID NO: 48334 - RNA, 23 nt, Artificial Sequence
  Synthetic oligonucleotide: CTLA4-2783
auccugccauuagcccaagggcu

SEQ ID NO: 48335 - RNA, 24 nt, Artificial Sequence
  Synthetic oligonucleotide: CTLA4-2784
aauccugccauuagcccaagggcu

SEQ ID NO: 48336 - RNA, 18 nt, Artificial Sequence
  Synthetic oligonucleotide: CTLA4-2785
gagcgccagguauuuagu

SEQ ID NO: 48337 - RNA, 19 nt, Artificial Sequence
  Synthetic oligonucleotide: CTLA4-2786
agagcgccagguauuuagu

SEQ ID NO: 48338 - RNA, 20 nt, Artificial Sequence
  Synthetic oligonucleotide: CTLA4-511
cagagcgccagguauuuagu

SEQ ID NO: 48339 - RNA, 21 nt, Artificial Sequence
  Synthetic oligonucleotide: CTLA4-2787
acagagcgccagguauuuagu

SEQ ID NO: 48340 - RNA, 22 nt, Artificial Sequence
  Synthetic oligonucleotide: CTLA4-2788
aacagagcgccagguauuuagu

SEQ ID NO: 48341 - RNA, 23 nt, Artificial Sequence
  Synthetic oligonucleotide: CTLA4-2789
gaacagagcgccagguauuuagu

SEQ ID NO: 48342 - RNA, 24 nt, Artificial Sequence
  Synthetic oligonucleotide: CTLA4-2790
agaacagagcgccagguauuuagu

SEQ ID NO: 48343 - RNA, 18 nt, Artificial Sequence
  Synthetic oligonucleotide: CTLA4-2791
uugaauaaaauugggauu

SEQ ID NO: 48344 - RNA, 19 nt, Artificial Sequence
  Synthetic oligonucleotide: CTLA4-2792
auugaauaaaauugggauu

SEQ ID NO: 48345 - RNA, 20 nt, Artificial Sequence
  Synthetic oligonucleotide: CTLA4-835
gauugaauaaaauugggauu

SEQ ID NO: 48346 - RNA, 21 nt, Artificial Sequence
  Synthetic oligonucleotide: CTLA4-2793
agauugaauaaaauugggauu

SEQ ID NO: 48347 - RNA, 22 nt, Artificial Sequence
  Synthetic oligonucleotide: CTLA4-2794
aagauugaauaaaauugggauu

SEQ ID NO: 48348 - RNA, 23 nt, Artificial Sequence
  Synthetic oligonucleotide: CTLA4-2795
gaagauugaauaaaauugggauu

SEQ ID NO: 48349 - RNA, 24 nt, Artificial Sequence
  Synthetic oligonucleotide: CTLA4-2796
agaagauugaauaaaauugggauu

SEQ ID NO: 48350 - RNA, 18 nt, Artificial Sequence
  Synthetic oligonucleotide: CTLA4-2797
ccaaaugcuaaauggauu

SEQ ID NO: 48351 - RNA, 19 nt, Artificial Sequence
  Synthetic oligonucleotide: CTLA4-2798
accaaaugcuaaauggauu

SEQ ID NO: 48352 - RNA, 20 nt, Artificial Sequence
  Synthetic oligonucleotide: CTLA4-1131
aaccaaaugcuaaauggauu

SEQ ID NO: 48353 - RNA, 21 nt, Artificial Sequence
  Synthetic oligonucleotide: CTLA4-2799
uaaccaaaugcuaaauggauu

SEQ ID NO: 48354 - RNA, 22 nt, Artificial Sequence
  Synthetic oligonucleotide: CTLA4-2800
uuaaccaaaugcuaaauggauu

SEQ ID NO: 48355 - RNA, 23 nt, Artificial Sequence
  Synthetic oligonucleotide: CTLA4-2801
cuuaaccaaaugcuaaauggauu

SEQ ID NO: 48356 - RNA, 24 nt, Artificial Sequence
  Synthetic oligonucleotide: CTLA4-2802
ucuuaaccaaaugcuaaauggauu

SEQ ID NO: 48357 - RNA, 18 nt, Artificial Sequence
  Synthetic oligonucleotide: CTLA4-1812
caaaggugagugagacuu

SEQ ID NO: 48358 - RNA, 19 nt, Artificial Sequence
  Synthetic oligonucleotide: CTLA4-1813
gcaaaggugagugagacuu

SEQ ID NO: 48359 - RNA, 20 nt, Artificial Sequence
  Synthetic oligonucleotide: CTLA4-221
ugcaaaggugagugagacuu

SEQ ID NO: 48360 - RNA, 21 nt, Artificial Sequence
  Synthetic oligonucleotide: CTLA4-1814
cugcaaaggugagugagacuu

SEQ ID NO: 48361 - RNA, 22 nt, Artificial Sequence
  Synthetic oligonucleotide: CTLA4-1815
ucugcaaaggugagugagacuu

SEQ ID NO: 48362 - RNA, 23 nt, Artificial Sequence
  Synthetic oligonucleotide: CTLA4-1816
uucugcaaaggugagugagacuu

SEQ ID NO: 48363 - RNA, 24 nt, Artificial Sequence
  Synthetic oligonucleotide: CTLA4-1817
cuucugcaaaggugagugagacuu

SEQ ID NO: 48364 - RNA, 18 nt, Artificial Sequence
  Synthetic oligonucleotide: CTLA4-2803
guuagcagccuaguaguu

SEQ ID NO: 48365 - RNA, 19 nt, Artificial Sequence
  Synthetic oligonucleotide: CTLA4-2804
aguuagcagccuaguaguu

SEQ ID NO: 48366 - RNA, 20 nt, Artificial Sequence
  Synthetic oligonucleotide: CTLA4-824
aaguuagcagccuaguaguu

SEQ ID NO: 48367 - RNA, 21 nt, Artificial Sequence
  Synthetic oligonucleotide: CTLA4-2805
aaaguuagcagccuaguaguu

SEQ ID NO: 48368 - RNA, 22 nt, Artificial Sequence
  Synthetic oligonucleotide: CTLA4-2806
gaaaguuagcagccuaguaguu

SEQ ID NO: 48369 - RNA, 23 nt, Artificial Sequence
  Synthetic oligonucleotide: CTLA4-2807
agaaaguuagcagccuaguaguu

SEQ ID NO: 48370 - RNA, 24 nt, Artificial Sequence
  Synthetic oligonucleotide: CTLA4-2808
cagaaaguuagcagccuaguaguu

SEQ ID NO: 48371 - RNA, 18 nt, Artificial Sequence
  Synthetic oligonucleotide: CTLA4-2809
ugaauaaaauugggauuu

SEQ ID NO: 48372 - RNA, 19 nt, Artificial Sequence
  Synthetic oligonucleotide: CTLA4-2810
uugaauaaaauugggauuu

SEQ ID NO: 48373 - RNA, 20 nt, Artificial Sequence
  Synthetic oligonucleotide: CTLA4-469
auugaauaaaauugggauuu

SEQ ID NO: 48374 - RNA, 21 nt, Artificial Sequence
  Synthetic oligonucleotide: CTLA4-2811
gauugaauaaaauugggauuu

SEQ ID NO: 48375 - RNA, 22 nt, Artificial Sequence
  Synthetic oligonucleotide: CTLA4-2812
agauugaauaaaauugggauuu

SEQ ID NO: 48376 - RNA, 23 nt, Artificial Sequence
  Synthetic oligonucleotide: CTLA4-2813
aagauugaauaaaauugggauuu

SEQ ID NO: 48377 - RNA, 24 nt, Artificial Sequence
  Synthetic oligonucleotide: CTLA4-2814
gaagauugaauaaaauugggauuu

SEQ ID NO: 48378 - RNA, 18 nt, Artificial Sequence
  Synthetic oligonucleotide: CTLA4-2815
caaaugcuaaauggauuu

SEQ ID NO: 48379 - RNA, 19 nt, Artificial Sequence
  Synthetic oligonucleotide: CTLA4-2816
ccaaaugcuaaauggauuu

SEQ ID NO: 48380 - RNA, 20 nt, Artificial Sequence
  Synthetic oligonucleotide: CTLA4-698
accaaaugcuaaauggauuu

SEQ ID NO: 48381 - RNA, 21 nt, Artificial Sequence
  Synthetic oligonucleotide: CTLA4-2817
aaccaaaugcuaaauggauuu

SEQ ID NO: 48382 - RNA, 22 nt, Artificial Sequence
  Synthetic oligonucleotide: CTLA4-2818
uaaccaaaugcuaaauggauuu

SEQ ID NO: 48383 - RNA, 23 nt, Artificial Sequence
  Synthetic oligonucleotide: CTLA4-2819
uuaaccaaaugcuaaauggauuu

SEQ ID NO: 48384 - RNA, 24 nt, Artificial Sequence
  Synthetic oligonucleotide: CTLA4-2820
cuuaaccaaaugcuaaauggauuu

SEQ ID NO: 48385 - RNA, 18 nt, Artificial Sequence
  Synthetic oligonucleotide: CTLA4-1818
aaaggugagugagacuuu

SEQ ID NO: 48386 - RNA, 19 nt, Artificial Sequence
  Synthetic oligonucleotide: CTLA4-1819
caaaggugagugagacuuu

SEQ ID NO: 48387 - RNA, 20 nt, Artificial Sequence
  Synthetic oligonucleotide: CTLA4-9
gcaaaggugagugagacuuu

SEQ ID NO: 48388 - RNA, 21 nt, Artificial Sequence
  Synthetic oligonucleotide: CTLA4-1820
ugcaaaggugagugagacuuu

SEQ ID NO: 48389 - RNA, 22 nt, Artificial Sequence
  Synthetic oligonucleotide: CTLA4-1821
cugcaaaggugagugagacuuu

SEQ ID NO: 48390 - RNA, 23 nt, Artificial Sequence
  Synthetic oligonucleotide: CTLA4-1822
ucugcaaaggugagugagacuuu

SEQ ID NO: 48391 - RNA, 24 nt, Artificial Sequence
  Synthetic oligonucleotide: CTLA4-1823
uucugcaaaggugagugagacuuu

SEQ ID NO: 48392 - RNA, 18 nt, Artificial Sequence
  Synthetic oligonucleotide: CTLA4-2821
cauucaauccuaagugca

SEQ ID NO: 48393 - RNA, 19 nt, Artificial Sequence
  Synthetic oligonucleotide: CTLA4-2822
ucauucaauccuaagugca

SEQ ID NO: 48394 - RNA, 20 nt, Artificial Sequence
  Synthetic oligonucleotide: CTLA4-2823
aucauucaauccuaagugca

SEQ ID NO: 48395 - RNA, 21 nt, Artificial Sequence
  Synthetic oligonucleotide: CTLA4-2824
caucauucaauccuaagugca

SEQ ID NO: 48396 - RNA, 22 nt, Artificial Sequence
  Synthetic oligonucleotide: CTLA4-2825
ucaucauucaauccuaagugca

SEQ ID NO: 48397 - RNA, 23 nt, Artificial Sequence
  Synthetic oligonucleotide: CTLA4-2826
gucaucauucaauccuaagugca

SEQ ID NO: 48398 - RNA, 24 nt, Artificial Sequence
  Synthetic oligonucleotide: CTLA4-2827
ugucaucauucaauccuaagugca

SEQ ID NO: 48399 - RNA, 18 nt, Artificial Sequence
  Synthetic oligonucleotide: CTLA4-2828
uaaggcuuuuaagaacac

SEQ ID NO: 48400 - RNA, 19 nt, Artificial Sequence
  Synthetic oligonucleotide: CTLA4-2829
uuaaggcuuuuaagaacac

SEQ ID NO: 48401 - RNA, 20 nt, Artificial Sequence
  Synthetic oligonucleotide: CTLA4-1128
guuaaggcuuuuaagaacac

SEQ ID NO: 48402 - RNA, 21 nt, Artificial Sequence
  Synthetic oligonucleotide: CTLA4-2830
aguuaaggcuuuuaagaacac

SEQ ID NO: 48403 - RNA, 22 nt, Artificial Sequence
  Synthetic oligonucleotide: CTLA4-2831
gaguuaaggcuuuuaagaacac

SEQ ID NO: 48404 - RNA, 23 nt, Artificial Sequence
  Synthetic oligonucleotide: CTLA4-2832
ugaguuaaggcuuuuaagaacac

SEQ ID NO: 48405 - RNA, 24 nt, Artificial Sequence
  Synthetic oligonucleotide: CTLA4-2833
uugaguuaaggcuuuuaagaacac

SEQ ID NO: 48406 - RNA, 18 nt, Artificial Sequence
  Synthetic oligonucleotide: CTLA4-2834
uaagagaaccuuaaaacc

SEQ ID NO: 48407 - RNA, 19 nt, Artificial Sequence
  Synthetic oligonucleotide: CTLA4-2835
uuaagagaaccuuaaaacc

SEQ ID NO: 48408 - RNA, 20 nt, Artificial Sequence
  Synthetic oligonucleotide: CTLA4-1256
auuaagagaaccuuaaaacc

SEQ ID NO: 48409 - RNA, 21 nt, Artificial Sequence
  Synthetic oligonucleotide: CTLA4-2836
gauuaagagaaccuuaaaacc

SEQ ID NO: 48410 - RNA, 22 nt, Artificial Sequence
  Synthetic oligonucleotide: CTLA4-2837
ugauuaagagaaccuuaaaacc

SEQ ID NO: 48411 - RNA, 23 nt, Artificial Sequence
  Synthetic oligonucleotide: CTLA4-2838
uugauuaagagaaccuuaaaacc

SEQ ID NO: 48412 - RNA, 24 nt, Artificial Sequence
  Synthetic oligonucleotide: CTLA4-2839
auugauuaagagaaccuuaaaacc

SEQ ID NO: 48413 - RNA, 18 nt, Artificial Sequence
  Synthetic oligonucleotide: CTLA4-2840
uccgaggaccuuaaaacc

SEQ ID NO: 48414 - RNA, 19 nt, Artificial Sequence
  Synthetic oligonucleotide: CTLA4-2841
auccgaggaccuuaaaacc

SEQ ID NO: 48415 - RNA, 20 nt, Artificial Sequence
  Synthetic oligonucleotide: CTLA4-1251
aauccgaggaccuuaaaacc

SEQ ID NO: 48416 - RNA, 21 nt, Artificial Sequence
  Synthetic oligonucleotide: CTLA4-2842
gaauccgaggaccuuaaaacc

SEQ ID NO: 48417 - RNA, 22 nt, Artificial Sequence
  Synthetic oligonucleotide: CTLA4-2843
ugaauccgaggaccuuaaaacc

SEQ ID NO: 48418 - RNA, 23 nt, Artificial Sequence
  Synthetic oligonucleotide: CTLA4-2844
augaauccgaggaccuuaaaacc

SEQ ID NO: 48419 - RNA, 24 nt, Artificial Sequence
  Synthetic oligonucleotide: CTLA4-2845
uaugaauccgaggaccuuaaaacc

SEQ ID NO: 48420 - RNA, 18 nt, Artificial Sequence
  Synthetic oligonucleotide: CTLA4-2846
gcauauuacagguucccc

SEQ ID NO: 48421 - RNA, 19 nt, Artificial Sequence
  Synthetic oligonucleotide: CTLA4-2847
ggcauauuacagguucccc

SEQ ID NO: 48422 - RNA, 20 nt, Artificial Sequence
  Synthetic oligonucleotide: CTLA4-2848
gggcauauuacagguucccc

SEQ ID NO: 48423 - RNA, 21 nt, Artificial Sequence
  Synthetic oligonucleotide: CTLA4-2849
cgggcauauuacagguucccc

SEQ ID NO: 48424 - RNA, 22 nt, Artificial Sequence
  Synthetic oligonucleotide: CTLA4-2850
ccgggcauauuacagguucccc

SEQ ID NO: 48425 - RNA, 23 nt, Artificial Sequence
  Synthetic oligonucleotide: CTLA4-2851
uccgggcauauuacagguucccc

SEQ ID NO: 48426 - RNA, 24 nt, Artificial Sequence
  Synthetic oligonucleotide: CTLA4-2852
uuccgggcauauuacagguucccc

SEQ ID NO: 48427 - RNA, 18 nt, Artificial Sequence
  Synthetic oligonucleotide: CTLA4-2853
uagcaaaaaaacucuucc

SEQ ID NO: 48428 - RNA, 19 nt, Artificial Sequence
  Synthetic oligonucleotide: CTLA4-2854
auagcaaaaaaacucuucc

SEQ ID NO: 48429 - RNA, 20 nt, Artificial Sequence
  Synthetic oligonucleotide: CTLA4-1250
uauagcaaaaaaacucuucc

SEQ ID NO: 48430 - RNA, 21 nt, Artificial Sequence
  Synthetic oligonucleotide: CTLA4-2855
guauagcaaaaaaacucuucc

SEQ ID NO: 48431 - RNA, 22 nt, Artificial Sequence
  Synthetic oligonucleotide: CTLA4-2856
uguauagcaaaaaaacucuucc

SEQ ID NO: 48432 - RNA, 23 nt, Artificial Sequence
  Synthetic oligonucleotide: CTLA4-2857
uuguauagcaaaaaaacucuucc

SEQ ID NO: 48433 - RNA, 24 nt, Artificial Sequence
  Synthetic oligonucleotide: CTLA4-2858
auuguauagcaaaaaaacucuucc

SEQ ID NO: 48434 - RNA, 18 nt, Artificial Sequence
  Synthetic oligonucleotide: CTLA4-2859
auggacggcucuaaucuc

SEQ ID NO: 48435 - RNA, 19 nt, Artificial Sequence
  Synthetic oligonucleotide: CTLA4-2860
uauggacggcucuaaucuc

SEQ ID NO: 48436 - RNA, 20 nt, Artificial Sequence
  Synthetic oligonucleotide: CTLA4-1123
uuauggacggcucuaaucuc

SEQ ID NO: 48437 - RNA, 21 nt, Artificial Sequence
  Synthetic oligonucleotide: CTLA4-2861
uuuauggacggcucuaaucuc

SEQ ID NO: 48438 - RNA, 22 nt, Artificial Sequence
  Synthetic oligonucleotide: CTLA4-2862
uuuuauggacggcucuaaucuc

SEQ ID NO: 48439 - RNA, 23 nt, Artificial Sequence
  Synthetic oligonucleotide: CTLA4-2863
cuuuuauggacggcucuaaucuc

SEQ ID NO: 48440 - RNA, 24 nt, Artificial Sequence
  Synthetic oligonucleotide: CTLA4-2864
ccuuuuauggacggcucuaaucuc

SEQ ID NO: 48441 - RNA, 18 nt, Artificial Sequence
  Synthetic oligonucleotide: CTLA4-2865
ucacuuccagucucauag

SEQ ID NO: 48442 - RNA, 19 nt, Artificial Sequence
  Synthetic oligonucleotide: CTLA4-2866
aucacuuccagucucauag

SEQ ID NO: 48443 - RNA, 20 nt, Artificial Sequence
  Synthetic oligonucleotide: CTLA4-1034
aaucacuuccagucucauag

SEQ ID NO: 48444 - RNA, 21 nt, Artificial Sequence
  Synthetic oligonucleotide: CTLA4-2867
aaaucacuuccagucucauag

SEQ ID NO: 48445 - RNA, 22 nt, Artificial Sequence
  Synthetic oligonucleotide: CTLA4-2868
uaaaucacuuccagucucauag

SEQ ID NO: 48446 - RNA, 23 nt, Artificial Sequence
  Synthetic oligonucleotide: CTLA4-2869
uuaaaucacuuccagucucauag

SEQ ID NO: 48447 - RNA, 24 nt, Artificial Sequence
  Synthetic oligonucleotide: CTLA4-2870
cuuaaaucacuuccagucucauag

SEQ ID NO: 48448 - RNA, 18 nt, Artificial Sequence
  Synthetic oligonucleotide: CTLA4-2871
aauuggcuaauuagcuag

SEQ ID NO: 48449 - RNA, 19 nt, Artificial Sequence
  Synthetic oligonucleotide: CTLA4-2872
uaauuggcuaauuagcuag

SEQ ID NO: 48450 - RNA, 20 nt, Artificial Sequence
  Synthetic oligonucleotide: CTLA4-1259
auaauuggcuaauuagcuag

SEQ ID NO: 48451 - RNA, 21 nt, Artificial Sequence
  Synthetic oligonucleotide: CTLA4-2873
aauaauuggcuaauuagcuag

SEQ ID NO: 48452 - RNA, 22 nt, Artificial Sequence
  Synthetic oligonucleotide: CTLA4-2874
aaauaauuggcuaauuagcuag

SEQ ID NO: 48453 - RNA, 23 nt, Artificial Sequence
  Synthetic oligonucleotide: CTLA4-2875
uaaauaauuggcuaauuagcuag

SEQ ID NO: 48454 - RNA, 24 nt, Artificial Sequence
  Synthetic oligonucleotide: CTLA4-2876
uuaaauaauuggcuaauuagcuag

SEQ ID NO: 48455 - RNA, 18 nt, Artificial Sequence
  Synthetic oligonucleotide: CTLA4-2877
aacucuguuuugucucug

SEQ ID NO: 48456 - RNA, 19 nt, Artificial Sequence
  Synthetic oligonucleotide: CTLA4-2878
caacucuguuuugucucug

SEQ ID NO: 48457 - RNA, 20 nt, Artificial Sequence
  Synthetic oligonucleotide: CTLA4-1126
ucaacucuguuuugucucug

SEQ ID NO: 48458 - RNA, 21 nt, Artificial Sequence
  Synthetic oligonucleotide: CTLA4-2879
uucaacucuguuuugucucug

SEQ ID NO: 48459 - RNA, 22 nt, Artificial Sequence
  Synthetic oligonucleotide: CTLA4-2880
cuucaacucuguuuugucucug

SEQ ID NO: 48460 - RNA, 23 nt, Artificial Sequence
  Synthetic oligonucleotide: CTLA4-2881
ucuucaacucuguuuugucucug

SEQ ID NO: 48461 - RNA, 24 nt, Artificial Sequence
  Synthetic oligonucleotide: CTLA4-2882
uucuucaacucuguuuugucucug

SEQ ID NO: 48462 - RNA, 18 nt, Artificial Sequence
  Synthetic oligonucleotide: CTLA4-2883
ucuaaucucuugaaucau

SEQ ID NO: 48463 - RNA, 19 nt, Artificial Sequence
  Synthetic oligonucleotide: CTLA4-2884
cucuaaucucuugaaucau

SEQ ID NO: 48464 - RNA, 20 nt, Artificial Sequence
  Synthetic oligonucleotide: CTLA4-1124
gcucuaaucucuugaaucau

SEQ ID NO: 48465 - RNA, 21 nt, Artificial Sequence
  Synthetic oligonucleotide: CTLA4-2885
ggcucuaaucucuugaaucau

SEQ ID NO: 48466 - RNA, 22 nt, Artificial Sequence
  Synthetic oligonucleotide: CTLA4-2886
cggcucuaaucucuugaaucau

SEQ ID NO: 48467 - RNA, 23 nt, Artificial Sequence
  Synthetic oligonucleotide: CTLA4-2887
acggcucuaaucucuugaaucau

SEQ ID NO: 48468 - RNA, 24 nt, Artificial Sequence
  Synthetic oligonucleotide: CTLA4-2888
gacggcucuaaucucuugaaucau

SEQ ID NO: 48469 - RNA, 18 nt, Artificial Sequence
  Synthetic oligonucleotide: CTLA4-2889
aauucauuuauaaaguau

SEQ ID NO: 48470 - RNA, 19 nt, Artificial Sequence
  Synthetic oligonucleotide: CTLA4-2890
uaauucauuuauaaaguau

SEQ ID NO: 48471 - RNA, 20 nt, Artificial Sequence
  Synthetic oligonucleotide: CTLA4-1254
cuaauucauuuauaaaguau

SEQ ID NO: 48472 - RNA, 21 nt, Artificial Sequence
  Synthetic oligonucleotide: CTLA4-2891
gcuaauucauuuauaaaguau

SEQ ID NO: 48473 - RNA, 22 nt, Artificial Sequence
  Synthetic oligonucleotide: CTLA4-2892
ggcuaauucauuuauaaaguau

SEQ ID NO: 48474 - RNA, 23 nt, Artificial Sequence
  Synthetic oligonucleotide: CTLA4-2893
uggcuaauucauuuauaaaguau

SEQ ID NO: 48475 - RNA, 24 nt, Artificial Sequence
  Synthetic oligonucleotide: CTLA4-2894
cuggcuaauucauuuauaaaguau

SEQ ID NO: 48476 - RNA, 18 nt, Artificial Sequence
  Synthetic oligonucleotide: CTLA4-2895
ucugaagagcugaaaacu

SEQ ID NO: 48477 - RNA, 19 nt, Artificial Sequence
  Synthetic oligonucleotide: CTLA4-2896
cucugaagagcugaaaacu

SEQ ID NO: 48478 - RNA, 20 nt, Artificial Sequence
  Synthetic oligonucleotide: CTLA4-1261
ucucugaagagcugaaaacu

SEQ ID NO: 48479 - RNA, 18 nt, Artificial Sequence
  Synthetic oligonucleotide: CTLA4-2897
uauauuuaaucuucacuu

SEQ ID NO: 48480 - RNA, 19 nt, Artificial Sequence
  Synthetic oligonucleotide: CTLA4-2898
uuauauuuaaucuucacuu

SEQ ID NO: 48481 - RNA, 20 nt, Artificial Sequence
  Synthetic oligonucleotide: CTLA4-1119
guuauauuuaaucuucacuu

SEQ ID NO: 48482 - RNA, 21 nt, Artificial Sequence
  Synthetic oligonucleotide: CTLA4-2899
gguuauauuuaaucuucacuu

SEQ ID NO: 48483 - RNA, 22 nt, Artificial Sequence
  Synthetic oligonucleotide: CTLA4-2900
ugguuauauuuaaucuucacuu

SEQ ID NO: 48484 - RNA, 23 nt, Artificial Sequence
  Synthetic oligonucleotide: CTLA4-2901
cugguuauauuuaaucuucacuu

SEQ ID NO: 48485 - RNA, 24 nt, Artificial Sequence
  Synthetic oligonucleotide: CTLA4-2902
ucugguuauauuuaaucuucacuu

SEQ ID NO: 48486 - RNA, 18 nt, Artificial Sequence
  Synthetic oligonucleotide: CTLA4-2903
aacucaacagagacaaaa

SEQ ID NO: 48487 - RNA, 19 nt, Artificial Sequence
  Synthetic oligonucleotide: CTLA4-2904
uaacucaacagagacaaaa

SEQ ID NO: 48488 - RNA, 20 nt, Artificial Sequence
  Synthetic oligonucleotide: CTLA4-1236
uuaacucaacagagacaaaa

SEQ ID NO: 48489 - RNA, 21 nt, Artificial Sequence
  Synthetic oligonucleotide: CTLA4-2905
cuuaacucaacagagacaaaa

SEQ ID NO: 48490 - RNA, 22 nt, Artificial Sequence
  Synthetic oligonucleotide: CTLA4-2906
ccuuaacucaacagagacaaaa

SEQ ID NO: 48491 - RNA, 23 nt, Artificial Sequence
  Synthetic oligonucleotide: CTLA4-2907
gccuuaacucaacagagacaaaa

SEQ ID NO: 48492 - RNA, 24 nt, Artificial Sequence
  Synthetic oligonucleotide: CTLA4-2908
agccuuaacucaacagagacaaaa

SEQ ID NO: 48493 - RNA, 18 nt, Artificial Sequence
  Synthetic oligonucleotide: CTLA4-2909
gaccaaugaucuaacaaa

SEQ ID NO: 48494 - RNA, 19 nt, Artificial Sequence
  Synthetic oligonucleotide: CTLA4-2910
ggaccaaugaucuaacaaa

SEQ ID NO: 48495 - RNA, 20 nt, Artificial Sequence
  Synthetic oligonucleotide: CTLA4-1225
aggaccaaugaucuaacaaa

SEQ ID NO: 48496 - RNA, 21 nt, Artificial Sequence
  Synthetic oligonucleotide: CTLA4-2911
caggaccaaugaucuaacaaa

SEQ ID NO: 48497 - RNA, 22 nt, Artificial Sequence
  Synthetic oligonucleotide: CTLA4-2912
acaggaccaaugaucuaacaaa

SEQ ID NO: 48498 - RNA, 23 nt, Artificial Sequence
  Synthetic oligonucleotide: CTLA4-2913
gacaggaccaaugaucuaacaaa

SEQ ID NO: 48499 - RNA, 24 nt, Artificial Sequence
  Synthetic oligonucleotide: CTLA4-2914
agacaggaccaaugaucuaacaaa

SEQ ID NO: 48500 - RNA, 18 nt, Artificial Sequence
  Synthetic oligonucleotide: CTLA4-2915
gauuagagccguccauaa

SEQ ID NO: 48501 - RNA, 19 nt, Artificial Sequence
  Synthetic oligonucleotide: CTLA4-2916
agauuagagccguccauaa

SEQ ID NO: 48502 - RNA, 20 nt, Artificial Sequence
  Synthetic oligonucleotide: CTLA4-1230
gagauuagagccguccauaa

SEQ ID NO: 48503 - RNA, 21 nt, Artificial Sequence
  Synthetic oligonucleotide: CTLA4-2917
agagauuagagccguccauaa

SEQ ID NO: 48504 - RNA, 22 nt, Artificial Sequence
  Synthetic oligonucleotide: CTLA4-2918
aagagauuagagccguccauaa

SEQ ID NO: 48505 - RNA, 23 nt, Artificial Sequence
  Synthetic oligonucleotide: CTLA4-2919
caagagauuagagccguccauaa

SEQ ID NO: 48506 - RNA, 24 nt, Artificial Sequence
  Synthetic oligonucleotide: CTLA4-2920
ucaagagauuagagccguccauaa

SEQ ID NO: 48507 - RNA, 18 nt, Artificial Sequence
  Synthetic oligonucleotide: CTLA4-2921
gauucauauacuuuauaa

SEQ ID NO: 48508 - RNA, 19 nt, Artificial Sequence
  Synthetic oligonucleotide: CTLA4-2922
ggauucauauacuuuauaa

SEQ ID NO: 48509 - RNA, 20 nt, Artificial Sequence
  Synthetic oligonucleotide: CTLA4-1140
cggauucauauacuuuauaa

SEQ ID NO: 48510 - RNA, 21 nt, Artificial Sequence
  Synthetic oligonucleotide: CTLA4-2923
ucggauucauauacuuuauaa

SEQ ID NO: 48511 - RNA, 22 nt, Artificial Sequence
  Synthetic oligonucleotide: CTLA4-2924
cucggauucauauacuuuauaa

SEQ ID NO: 48512 - RNA, 23 nt, Artificial Sequence
  Synthetic oligonucleotide: CTLA4-2925
ccucggauucauauacuuuauaa

SEQ ID NO: 48513 - RNA, 24 nt, Artificial Sequence
  Synthetic oligonucleotide: CTLA4-2926
uccucggauucauauacuuuauaa

SEQ ID NO: 48514 - RNA, 18 nt, Artificial Sequence
  Synthetic oligonucleotide: CTLA4-2927
aaacagacaguuguaaca

SEQ ID NO: 48515 - RNA, 19 nt, Artificial Sequence
  Synthetic oligonucleotide: CTLA4-2928
caaacagacaguuguaaca

SEQ ID NO: 48516 - RNA, 20 nt, Artificial Sequence
  Synthetic oligonucleotide: CTLA4-2140
gcaaacagacaguuguaaca

SEQ ID NO: 48517 - RNA, 21 nt, Artificial Sequence
  Synthetic oligonucleotide: CTLA4-2929
ugcaaacagacaguuguaaca

SEQ ID NO: 48518 - RNA, 22 nt, Artificial Sequence
  Synthetic oligonucleotide: CTLA4-2930
augcaaacagacaguuguaaca

SEQ ID NO: 48519 - RNA, 23 nt, Artificial Sequence
  Synthetic oligonucleotide: CTLA4-2931
caugcaaacagacaguuguaaca

SEQ ID NO: 48520 - RNA, 24 nt, Artificial Sequence
  Synthetic oligonucleotide: CTLA4-2932
acaugcaaacagacaguuguaaca

SEQ ID NO: 48521 - RNA, 18 nt, Artificial Sequence
  Synthetic oligonucleotide: CTLA4-2933
ucugguuuugcagaagga

SEQ ID NO: 48522 - RNA, 19 nt, Artificial Sequence
  Synthetic oligonucleotide: CTLA4-2934
cucugguuuugcagaagga

SEQ ID NO: 48523 - RNA, 20 nt, Artificial Sequence
  Synthetic oligonucleotide: CTLA4-1238
ccucugguuuugcagaagga

SEQ ID NO: 48524 - RNA, 21 nt, Artificial Sequence
  Synthetic oligonucleotide: CTLA4-2935
gccucugguuuugcagaagga

SEQ ID NO: 48525 - RNA, 22 nt, Artificial Sequence
  Synthetic oligonucleotide: CTLA4-2936
ugccucugguuuugcagaagga

SEQ ID NO: 48526 - RNA, 23 nt, Artificial Sequence
  Synthetic oligonucleotide: CTLA4-2937
cugccucugguuuugcagaagga

SEQ ID NO: 48527 - RNA, 24 nt, Artificial Sequence
  Synthetic oligonucleotide: CTLA4-2938
gcugccucugguuuugcagaagga

SEQ ID NO: 48528 - RNA, 18 nt, Artificial Sequence
  Synthetic oligonucleotide: CTLA4-2939
aauucugugcacuuagga

SEQ ID NO: 48529 - RNA, 19 nt, Artificial Sequence
  Synthetic oligonucleotide: CTLA4-2940
gaauucugugcacuuagga

SEQ ID NO: 48530 - RNA, 20 nt, Artificial Sequence
  Synthetic oligonucleotide: CTLA4-2941
ggaauucugugcacuuagga

SEQ ID NO: 48531 - RNA, 21 nt, Artificial Sequence
  Synthetic oligonucleotide: CTLA4-2942
cggaauucugugcacuuagga

SEQ ID NO: 48532 - RNA, 22 nt, Artificial Sequence
  Synthetic oligonucleotide: CTLA4-2943
ccggaauucugugcacuuagga

SEQ ID NO: 48533 - RNA, 23 nt, Artificial Sequence
  Synthetic oligonucleotide: CTLA4-2944
cccggaauucugugcacuuagga

SEQ ID NO: 48534 - RNA, 24 nt, Artificial Sequence
  Synthetic oligonucleotide: CTLA4-2945
gcccggaauucugugcacuuagga

SEQ ID NO: 48535 - RNA, 18 nt, Artificial Sequence
  Synthetic oligonucleotide: CTLA4-2946
gaagugauuuaagaggga

SEQ ID NO: 48536 - RNA, 19 nt, Artificial Sequence
  Synthetic oligonucleotide: CTLA4-2947
ggaagugauuuaagaggga

SEQ ID NO: 48537 - RNA, 20 nt, Artificial Sequence
  Synthetic oligonucleotide: CTLA4-888
uggaagugauuuaagaggga

SEQ ID NO: 48538 - RNA, 21 nt, Artificial Sequence
  Synthetic oligonucleotide: CTLA4-2948
cuggaagugauuuaagaggga

SEQ ID NO: 48539 - RNA, 22 nt, Artificial Sequence
  Synthetic oligonucleotide: CTLA4-2949
acuggaagugauuuaagaggga

SEQ ID NO: 48540 - RNA, 23 nt, Artificial Sequence
  Synthetic oligonucleotide: CTLA4-2950
gacuggaagugauuuaagaggga

SEQ ID NO: 48541 - RNA, 24 nt, Artificial Sequence
  Synthetic oligonucleotide: CTLA4-2951
agacuggaagugauuuaagaggga

SEQ ID NO: 48542 - RNA, 18 nt, Artificial Sequence
  Synthetic oligonucleotide: CTLA4-2952
gugaagauuaaauauaac

SEQ ID NO: 48543 - RNA, 19 nt, Artificial Sequence
  Synthetic oligonucleotide: CTLA4-2953
agugaagauuaaauauaac

SEQ ID NO: 48544 - RNA, 20 nt, Artificial Sequence
  Synthetic oligonucleotide: CTLA4-1227
aagugaagauuaaauauaac

SEQ ID NO: 48545 - RNA, 21 nt, Artificial Sequence
  Synthetic oligonucleotide: CTLA4-2954
aaagugaagauuaaauauaac

SEQ ID NO: 48546 - RNA, 22 nt, Artificial Sequence
  Synthetic oligonucleotide: CTLA4-2955
aaaagugaagauuaaauauaac

SEQ ID NO: 48547 - RNA, 23 nt, Artificial Sequence
  Synthetic oligonucleotide: CTLA4-2956
caaaagugaagauuaaauauaac

SEQ ID NO: 48548 - RNA, 24 nt, Artificial Sequence
  Synthetic oligonucleotide: CTLA4-2957
ucaaaagugaagauuaaauauaac

SEQ ID NO: 48549 - RNA, 18 nt, Artificial Sequence
  Synthetic oligonucleotide: CTLA4-2958
gggaaccuguaauaugcc

SEQ ID NO: 48550 - RNA, 19 nt, Artificial Sequence
  Synthetic oligonucleotide: CTLA4-2959
ggggaaccuguaauaugcc

SEQ ID NO: 48551 - RNA, 20 nt, Artificial Sequence
  Synthetic oligonucleotide: CTLA4-2147
uggggaaccuguaauaugcc

SEQ ID NO: 48552 - RNA, 21 nt, Artificial Sequence
  Synthetic oligonucleotide: CTLA4-2960
auggggaaccuguaauaugcc

SEQ ID NO: 48553 - RNA, 22 nt, Artificial Sequence
  Synthetic oligonucleotide: CTLA4-2961
cauggggaaccuguaauaugcc

SEQ ID NO: 48554 - RNA, 23 nt, Artificial Sequence
  Synthetic oligonucleotide: CTLA4-2962
ucauggggaaccuguaauaugcc

SEQ ID NO: 48555 - RNA, 24 nt, Artificial Sequence
  Synthetic oligonucleotide: CTLA4-2963
uucauggggaaccuguaauaugcc

SEQ ID NO: 48556 - RNA, 18 nt, Artificial Sequence
  Synthetic oligonucleotide: CTLA4-2964
uucaagguuuuaaggucc

SEQ ID NO: 48557 - RNA, 19 nt, Artificial Sequence
  Synthetic oligonucleotide: CTLA4-2965
auucaagguuuuaaggucc

SEQ ID NO: 48558 - RNA, 20 nt, Artificial Sequence
  Synthetic oligonucleotide: CTLA4-1139
aauucaagguuuuaaggucc

SEQ ID NO: 48559 - RNA, 21 nt, Artificial Sequence
  Synthetic oligonucleotide: CTLA4-2966
caauucaagguuuuaaggucc

SEQ ID NO: 48560 - RNA, 22 nt, Artificial Sequence
  Synthetic oligonucleotide: CTLA4-2967
acaauucaagguuuuaaggucc

SEQ ID NO: 48561 - RNA, 23 nt, Artificial Sequence
  Synthetic oligonucleotide: CTLA4-2968
uacaauucaagguuuuaaggucc

SEQ ID NO: 48562 - RNA, 24 nt, Artificial Sequence
  Synthetic oligonucleotide: CTLA4-2969
auacaauucaagguuuuaaggucc

SEQ ID NO: 48563 - RNA, 18 nt, Artificial Sequence
  Synthetic oligonucleotide: CTLA4-2970
gaaaggauagccauaguc

SEQ ID NO: 48564 - RNA, 19 nt, Artificial Sequence
  Synthetic oligonucleotide: CTLA4-2971
ggaaaggauagccauaguc

SEQ ID NO: 48565 - RNA, 20 nt, Artificial Sequence
  Synthetic oligonucleotide: CTLA4-889
gggaaaggauagccauaguc

SEQ ID NO: 48566 - RNA, 21 nt, Artificial Sequence
  Synthetic oligonucleotide: CTLA4-2972
agggaaaggauagccauaguc

SEQ ID NO: 48567 - RNA, 22 nt, Artificial Sequence
  Synthetic oligonucleotide: CTLA4-2973
gagggaaaggauagccauaguc

SEQ ID NO: 48568 - RNA, 23 nt, Artificial Sequence
  Synthetic oligonucleotide: CTLA4-2974
agagggaaaggauagccauaguc

SEQ ID NO: 48569 - RNA, 24 nt, Artificial Sequence
  Synthetic oligonucleotide: CTLA4-2975
aagagggaaaggauagccauaguc

SEQ ID NO: 48570 - RNA, 18 nt, Artificial Sequence
  Synthetic oligonucleotide: CTLA4-2976
guccugaauacauuugag

SEQ ID NO: 48571 - RNA, 19 nt, Artificial Sequence
  Synthetic oligonucleotide: CTLA4-2977
aguccugaauacauuugag

SEQ ID NO: 48572 - RNA, 20 nt, Artificial Sequence
  Synthetic oligonucleotide: CTLA4-891
uaguccugaauacauuugag

SEQ ID NO: 48573 - RNA, 21 nt, Artificial Sequence
  Synthetic oligonucleotide: CTLA4-2978
auaguccugaauacauuugag

SEQ ID NO: 48574 - RNA, 22 nt, Artificial Sequence
  Synthetic oligonucleotide: CTLA4-2979
cauaguccugaauacauuugag

SEQ ID NO: 48575 - RNA, 23 nt, Artificial Sequence
  Synthetic oligonucleotide: CTLA4-2980
ccauaguccugaauacauuugag

SEQ ID NO: 48576 - RNA, 24 nt, Artificial Sequence
  Synthetic oligonucleotide: CTLA4-2981
gccauaguccugaauacauuugag

SEQ ID NO: 48577 - RNA, 18 nt, Artificial Sequence
  Synthetic oligonucleotide: CTLA4-2982
acuuaagcaaauccuggg

SEQ ID NO: 48578 - RNA, 19 nt, Artificial Sequence
  Synthetic oligonucleotide: CTLA4-2983
gacuuaagcaaauccuggg

SEQ ID NO: 48579 - RNA, 20 nt, Artificial Sequence
  Synthetic oligonucleotide: CTLA4-2984
ugacuuaagcaaauccuggg

SEQ ID NO: 48580 - RNA, 21 nt, Artificial Sequence
  Synthetic oligonucleotide: CTLA4-2985
uugacuuaagcaaauccuggg

SEQ ID NO: 48581 - RNA, 22 nt, Artificial Sequence
  Synthetic oligonucleotide: CTLA4-2986
auugacuuaagcaaauccuggg

SEQ ID NO: 48582 - RNA, 23 nt, Artificial Sequence
  Synthetic oligonucleotide: CTLA4-2987
aauugacuuaagcaaauccuggg

SEQ ID NO: 48583 - RNA, 24 nt, Artificial Sequence
  Synthetic oligonucleotide: CTLA4-2988
aaauugacuuaagcaaauccuggg

SEQ ID NO: 48584 - RNA, 18 nt, Artificial Sequence
  Synthetic oligonucleotide: CTLA4-2989
auguagggaaauuguggg

SEQ ID NO: 48585 - RNA, 19 nt, Artificial Sequence
  Synthetic oligonucleotide: CTLA4-2990
aauguagggaaauuguggg

SEQ ID NO: 48586 - RNA, 20 nt, Artificial Sequence
  Synthetic oligonucleotide: CTLA4-1147
aaauguagggaaauuguggg

SEQ ID NO: 48587 - RNA, 21 nt, Artificial Sequence
  Synthetic oligonucleotide: CTLA4-2991
aaaauguagggaaauuguggg

SEQ ID NO: 48588 - RNA, 22 nt, Artificial Sequence
  Synthetic oligonucleotide: CTLA4-2992
uaaaauguagggaaauuguggg

SEQ ID NO: 48589 - RNA, 23 nt, Artificial Sequence
  Synthetic oligonucleotide: CTLA4-2993
uuaaaauguagggaaauuguggg

SEQ ID NO: 48590 - RNA, 24 nt, Artificial Sequence
  Synthetic oligonucleotide: CTLA4-2994
uuuaaaauguagggaaauuguggg

SEQ ID NO: 48591 - RNA, 18 nt, Artificial Sequence
  Synthetic oligonucleotide: CTLA4-2995
ggaccuuccuuaaaucug

SEQ ID NO: 48592 - RNA, 19 nt, Artificial Sequence
  Synthetic oligonucleotide: CTLA4-2996
aggaccuuccuuaaaucug

SEQ ID NO: 48593 - RNA, 20 nt, Artificial Sequence
  Synthetic oligonucleotide: CTLA4-1219
gaggaccuuccuuaaaucug

SEQ ID NO: 48594 - RNA, 21 nt, Artificial Sequence
  Synthetic oligonucleotide: CTLA4-2997
ugaggaccuuccuuaaaucug

SEQ ID NO: 48595 - RNA, 22 nt, Artificial Sequence
  Synthetic oligonucleotide: CTLA4-2998
uugaggaccuuccuuaaaucug

SEQ ID NO: 48596 - RNA, 23 nt, Artificial Sequence
  Synthetic oligonucleotide: CTLA4-2999
auugaggaccuuccuuaaaucug

SEQ ID NO: 48597 - RNA, 24 nt, Artificial Sequence
  Synthetic oligonucleotide: CTLA4-3000
cauugaggaccuuccuuaaaucug

SEQ ID NO: 48598 - RNA, 18 nt, Artificial Sequence
  Synthetic oligonucleotide: CTLA4-3001
cccggaauucugugcacu

SEQ ID NO: 48599 - RNA, 19 nt, Artificial Sequence
  Synthetic oligonucleotide: CTLA4-3002
gcccggaauucugugcacu

SEQ ID NO: 48600 - RNA, 20 nt, Artificial Sequence
  Synthetic oligonucleotide: CTLA4-3003
ugcccggaauucugugcacu

SEQ ID NO: 48601 - RNA, 21 nt, Artificial Sequence
  Synthetic oligonucleotide: CTLA4-3004
augcccggaauucugugcacu

SEQ ID NO: 48602 - RNA, 22 nt, Artificial Sequence
  Synthetic oligonucleotide: CTLA4-3005
uaugcccggaauucugugcacu

SEQ ID NO: 48603 - RNA, 23 nt, Artificial Sequence
  Synthetic oligonucleotide: CTLA4-3006
auaugcccggaauucugugcacu

SEQ ID NO: 48604 - RNA, 24 nt, Artificial Sequence
  Synthetic oligonucleotide: CTLA4-3007
aauaugcccggaauucugugcacu

SEQ ID NO: 48605 - RNA, 18 nt, Artificial Sequence
  Synthetic oligonucleotide: CTLA4-3008
uuguugccugaccuacgu

SEQ ID NO: 48606 - RNA, 19 nt, Artificial Sequence
  Synthetic oligonucleotide: CTLA4-3009
auuguugccugaccuacgu

SEQ ID NO: 48607 - RNA, 20 nt, Artificial Sequence
  Synthetic oligonucleotide: CTLA4-1155
aauuguugccugaccuacgu

SEQ ID NO: 48608 - RNA, 21 nt, Artificial Sequence
  Synthetic oligonucleotide: CTLA4-3010
uaauuguugccugaccuacgu

SEQ ID NO: 48609 - RNA, 22 nt, Artificial Sequence
  Synthetic oligonucleotide: CTLA4-3011
uuaauuguugccugaccuacgu

SEQ ID NO: 48610 - RNA, 23 nt, Artificial Sequence
  Synthetic oligonucleotide: CTLA4-3012
cuuaauuguugccugaccuacgu

SEQ ID NO: 48611 - RNA, 24 nt, Artificial Sequence
  Synthetic oligonucleotide: CTLA4-3013
acuuaauuguugccugaccuacgu

SEQ ID NO: 48612 - RNA, 18 nt, Artificial Sequence
  Synthetic oligonucleotide: CTLA4-3014
uacauuugagcuggguuu

SEQ ID NO: 48613 - RNA, 19 nt, Artificial Sequence
  Synthetic oligonucleotide: CTLA4-3015
auacauuugagcuggguuu

SEQ ID NO: 48614 - RNA, 20 nt, Artificial Sequence
  Synthetic oligonucleotide: CTLA4-892
aauacauuugagcuggguuu

SEQ ID NO: 48615 - RNA, 21 nt, Artificial Sequence
  Synthetic oligonucleotide: CTLA4-3016
gaauacauuugagcuggguuu

SEQ ID NO: 48616 - RNA, 22 nt, Artificial Sequence
  Synthetic oligonucleotide: CTLA4-3017
ugaauacauuugagcuggguuu

SEQ ID NO: 48617 - RNA, 23 nt, Artificial Sequence
  Synthetic oligonucleotide: CTLA4-3018
cugaauacauuugagcuggguuu

SEQ ID NO: 48618 - RNA, 24 nt, Artificial Sequence
  Synthetic oligonucleotide: CTLA4-3019
ccugaauacauuugagcuggguuu

SEQ ID NO: 48619 - RNA, 18 nt, Artificial Sequence
  Synthetic oligonucleotide: CTLA4-3020
ucucugaagagcugaaaa

SEQ ID NO: 48620 - RNA, 19 nt, Artificial Sequence
  Synthetic oligonucleotide: CTLA4-3021
gucucugaagagcugaaaa

SEQ ID NO: 48621 - RNA, 20 nt, Artificial Sequence
  Synthetic oligonucleotide: CTLA4-1262
agucucugaagagcugaaaa

SEQ ID NO: 48622 - RNA, 18 nt, Artificial Sequence
  Synthetic oligonucleotide: CTLA4-3022
gcuaguagaauugauuaa

SEQ ID NO: 48623 - RNA, 19 nt, Artificial Sequence
  Synthetic oligonucleotide: CTLA4-3023
agcuaguagaauugauuaa

SEQ ID NO: 48624 - RNA, 20 nt, Artificial Sequence
  Synthetic oligonucleotide: CTLA4-1257
uagcuaguagaauugauuaa

SEQ ID NO: 48625 - RNA, 21 nt, Artificial Sequence
  Synthetic oligonucleotide: CTLA4-3024
uuagcuaguagaauugauuaa

SEQ ID NO: 48626 - RNA, 22 nt, Artificial Sequence
  Synthetic oligonucleotide: CTLA4-3025
auuagcuaguagaauugauuaa

SEQ ID NO: 48627 - RNA, 23 nt, Artificial Sequence
  Synthetic oligonucleotide: CTLA4-3026
aauuagcuaguagaauugauuaa

SEQ ID NO: 48628 - RNA, 24 nt, Artificial Sequence
  Synthetic oligonucleotide: CTLA4-3027
uaauuagcuaguagaauugauuaa

SEQ ID NO: 48629 - RNA, 18 nt, Artificial Sequence
  Synthetic oligonucleotide: CTLA4-3028
uaagucaauuuuuuuuaa

SEQ ID NO: 48630 - RNA, 19 nt, Artificial Sequence
  Synthetic oligonucleotide: CTLA4-3029
uuaagucaauuuuuuuuaa

SEQ ID NO: 48631 - RNA, 20 nt, Artificial Sequence
  Synthetic oligonucleotide: CTLA4-2139
cuuaagucaauuuuuuuuaa

SEQ ID NO: 48632 - RNA, 21 nt, Artificial Sequence
  Synthetic oligonucleotide: CTLA4-3030
gcuuaagucaauuuuuuuuaa

SEQ ID NO: 48633 - RNA, 22 nt, Artificial Sequence
  Synthetic oligonucleotide: CTLA4-3031
ugcuuaagucaauuuuuuuuaa

SEQ ID NO: 48634 - RNA, 23 nt, Artificial Sequence
  Synthetic oligonucleotide: CTLA4-3032
uugcuuaagucaauuuuuuuuaa

SEQ ID NO: 48635 - RNA, 24 nt, Artificial Sequence
  Synthetic oligonucleotide: CTLA4-3033
uuugcuuaagucaauuuuuuuuaa

SEQ ID NO: 48636 - RNA, 18 nt, Artificial Sequence
  Synthetic oligonucleotide: CTLA4-3034
aaaucacuuccagucuca

SEQ ID NO: 48637 - RNA, 19 nt, Artificial Sequence
  Synthetic oligonucleotide: CTLA4-3035
uaaaucacuuccagucuca

SEQ ID NO: 48638 - RNA, 20 nt, Artificial Sequence
  Synthetic oligonucleotide: CTLA4-1035
uuaaaucacuuccagucuca

SEQ ID NO: 48639 - RNA, 21 nt, Artificial Sequence
  Synthetic oligonucleotide: CTLA4-3036
cuuaaaucacuuccagucuca

SEQ ID NO: 48640 - RNA, 22 nt, Artificial Sequence
  Synthetic oligonucleotide: CTLA4-3037
ucuuaaaucacuuccagucuca

SEQ ID NO: 48641 - RNA, 23 nt, Artificial Sequence
  Synthetic oligonucleotide: CTLA4-3038
cucuuaaaucacuuccagucuca

SEQ ID NO: 48642 - RNA, 24 nt, Artificial Sequence
  Synthetic oligonucleotide: CTLA4-3039
ccucuuaaaucacuuccagucuca

SEQ ID NO: 48643 - RNA, 18 nt, Artificial Sequence
  Synthetic oligonucleotide: CTLA4-3040
aaaaccuugaauuaagua

SEQ ID NO: 48644 - RNA, 19 nt, Artificial Sequence
  Synthetic oligonucleotide: CTLA4-3041
uaaaaccuugaauuaagua

SEQ ID NO: 48645 - RNA, 20 nt, Artificial Sequence
  Synthetic oligonucleotide: CTLA4-1255
uuaaaaccuugaauuaagua

SEQ ID NO: 48646 - RNA, 21 nt, Artificial Sequence
  Synthetic oligonucleotide: CTLA4-3042
cuuaaaaccuugaauuaagua

SEQ ID NO: 48647 - RNA, 22 nt, Artificial Sequence
  Synthetic oligonucleotide: CTLA4-3043
ccuuaaaaccuugaauuaagua

SEQ ID NO: 48648 - RNA, 23 nt, Artificial Sequence
  Synthetic oligonucleotide: CTLA4-3044
accuuaaaaccuugaauuaagua

SEQ ID NO: 48649 - RNA, 24 nt, Artificial Sequence
  Synthetic oligonucleotide: CTLA4-3045
aaccuuaaaaccuugaauuaagua

SEQ ID NO: 48650 - RNA, 18 nt, Artificial Sequence
  Synthetic oligonucleotide: CTLA4-3046
gaaaacucuccagauuua

SEQ ID NO: 48651 - RNA, 19 nt, Artificial Sequence
  Synthetic oligonucleotide: CTLA4-3047
ugaaaacucuccagauuua

SEQ ID NO: 48652 - RNA, 20 nt, Artificial Sequence
  Synthetic oligonucleotide: CTLA4-684
augaaaacucuccagauuua

SEQ ID NO: 48653 - RNA, 21 nt, Artificial Sequence
  Synthetic oligonucleotide: CTLA4-3048
uaugaaaacucuccagauuua

SEQ ID NO: 48654 - RNA, 22 nt, Artificial Sequence
  Synthetic oligonucleotide: CTLA4-3049
guaugaaaacucuccagauuua

SEQ ID NO: 48655 - RNA, 23 nt, Artificial Sequence
  Synthetic oligonucleotide: CTLA4-3050
uguaugaaaacucuccagauuua

SEQ ID NO: 48656 - RNA, 24 nt, Artificial Sequence
  Synthetic oligonucleotide: CTLA4-3051
auguaugaaaacucuccagauuua

SEQ ID NO: 48657 - RNA, 18 nt, Artificial Sequence
  Synthetic oligonucleotide: CTLA4-3052
uuaagucaauuuuuuuua

SEQ ID NO: 48658 - RNA, 19 nt, Artificial Sequence
  Synthetic oligonucleotide: CTLA4-3053
cuuaagucaauuuuuuuua

SEQ ID NO: 48659 - RNA, 20 nt, Artificial Sequence
  Synthetic oligonucleotide: CTLA4-3054
gcuuaagucaauuuuuuuua

SEQ ID NO: 48660 - RNA, 21 nt, Artificial Sequence
  Synthetic oligonucleotide: CTLA4-3055
ugcuuaagucaauuuuuuuua

SEQ ID NO: 48661 - RNA, 22 nt, Artificial Sequence
  Synthetic oligonucleotide: CTLA4-3056
uugcuuaagucaauuuuuuuua

SEQ ID NO: 48662 - RNA, 23 nt, Artificial Sequence
  Synthetic oligonucleotide: CTLA4-3057
uuugcuuaagucaauuuuuuuua

SEQ ID NO: 48663 - RNA, 24 nt, Artificial Sequence
  Synthetic oligonucleotide: CTLA4-3058
auuugcuuaagucaauuuuuuuua

SEQ ID NO: 48664 - RNA, 18 nt, Artificial Sequence
  Synthetic oligonucleotide: CTLA4-3059
ucuuuccuucugcaaaac

SEQ ID NO: 48665 - RNA, 19 nt, Artificial Sequence
  Synthetic oligonucleotide: CTLA4-3060
uucuuuccuucugcaaaac

SEQ ID NO: 48666 - RNA, 20 nt, Artificial Sequence
  Synthetic oligonucleotide: CTLA4-1129
auucuuuccuucugcaaaac

SEQ ID NO: 48667 - RNA, 21 nt, Artificial Sequence
  Synthetic oligonucleotide: CTLA4-3061
aauucuuuccuucugcaaaac

SEQ ID NO: 48668 - RNA, 22 nt, Artificial Sequence
  Synthetic oligonucleotide: CTLA4-3062
gaauucuuuccuucugcaaaac

SEQ ID NO: 48669 - RNA, 23 nt, Artificial Sequence
  Synthetic oligonucleotide: CTLA4-3063
ugaauucuuuccuucugcaaaac

SEQ ID NO: 48670 - RNA, 24 nt, Artificial Sequence
  Synthetic oligonucleotide: CTLA4-3064
cugaauucuuuccuucugcaaaac

SEQ ID NO: 48671 - RNA, 18 nt, Artificial Sequence
  Synthetic oligonucleotide: CTLA4-3065
uauaaaguauaugaaucc

SEQ ID NO: 48672 - RNA, 19 nt, Artificial Sequence
  Synthetic oligonucleotide: CTLA4-3066
uuauaaaguauaugaaucc

SEQ ID NO: 48673 - RNA, 20 nt, Artificial Sequence
  Synthetic oligonucleotide: CTLA4-1252
uuuauaaaguauaugaaucc

SEQ ID NO: 48674 - RNA, 21 nt, Artificial Sequence
  Synthetic oligonucleotide: CTLA4-3067
auuuauaaaguauaugaaucc

SEQ ID NO: 48675 - RNA, 22 nt, Artificial Sequence
  Synthetic oligonucleotide: CTLA4-3068
cauuuauaaaguauaugaaucc

SEQ ID NO: 48676 - RNA, 23 nt, Artificial Sequence
  Synthetic oligonucleotide: CTLA4-3069
ucauuuauaaaguauaugaaucc

SEQ ID NO: 48677 - RNA, 24 nt, Artificial Sequence
  Synthetic oligonucleotide: CTLA4-3070
uucauuuauaaaguauaugaaucc

SEQ ID NO: 48678 - RNA, 18 nt, Artificial Sequence
  Synthetic oligonucleotide: CTLA4-3071
cacuuuugaauuuucugc

SEQ ID NO: 48679 - RNA, 19 nt, Artificial Sequence
  Synthetic oligonucleotide: CTLA4-3072
ucacuuuugaauuuucugc

SEQ ID NO: 48680 - RNA, 20 nt, Artificial Sequence
  Synthetic oligonucleotide: CTLA4-1120
uucacuuuugaauuuucugc

SEQ ID NO: 48681 - RNA, 21 nt, Artificial Sequence
  Synthetic oligonucleotide: CTLA4-3073
cuucacuuuugaauuuucugc

SEQ ID NO: 48682 - RNA, 22 nt, Artificial Sequence
  Synthetic oligonucleotide: CTLA4-3074
ucuucacuuuugaauuuucugc

SEQ ID NO: 48683 - RNA, 23 nt, Artificial Sequence
  Synthetic oligonucleotide: CTLA4-3075
aucuucacuuuugaauuuucugc

SEQ ID NO: 48684 - RNA, 24 nt, Artificial Sequence
  Synthetic oligonucleotide: CTLA4-3076
aaucuucacuuuugaauuuucugc

SEQ ID NO: 48685 - RNA, 18 nt, Artificial Sequence
  Synthetic oligonucleotide: CTLA4-3077
ggaacuugugagcucauc

SEQ ID NO: 48686 - RNA, 19 nt, Artificial Sequence
  Synthetic oligonucleotide: CTLA4-3078
aggaacuugugagcucauc

SEQ ID NO: 48687 - RNA, 20 nt, Artificial Sequence
  Synthetic oligonucleotide: CTLA4-1037
aaggaacuugugagcucauc

SEQ ID NO: 48688 - RNA, 21 nt, Artificial Sequence
  Synthetic oligonucleotide: CTLA4-3079
aaaggaacuugugagcucauc

SEQ ID NO: 48689 - RNA, 22 nt, Artificial Sequence
  Synthetic oligonucleotide: CTLA4-3080
uaaaggaacuugugagcucauc

SEQ ID NO: 48690 - RNA, 23 nt, Artificial Sequence
  Synthetic oligonucleotide: CTLA4-3081
uuaaaggaacuugugagcucauc

SEQ ID NO: 48691 - RNA, 24 nt, Artificial Sequence
  Synthetic oligonucleotide: CTLA4-3082
uuuaaaggaacuugugagcucauc

SEQ ID NO: 48692 - RNA, 18 nt, Artificial Sequence
  Synthetic oligonucleotide: CTLA4-3083
guuugcaugucagccuuc

SEQ ID NO: 48693 - RNA, 19 nt, Artificial Sequence
  Synthetic oligonucleotide: CTLA4-3084
uguuugcaugucagccuuc

SEQ ID NO: 48694 - RNA, 20 nt, Artificial Sequence
  Synthetic oligonucleotide: CTLA4-3085
cuguuugcaugucagccuuc

SEQ ID NO: 48695 - RNA, 21 nt, Artificial Sequence
  Synthetic oligonucleotide: CTLA4-3086
ucuguuugcaugucagccuuc

SEQ ID NO: 48696 - RNA, 22 nt, Artificial Sequence
  Synthetic oligonucleotide: CTLA4-3087
gucuguuugcaugucagccuuc

SEQ ID NO: 48697 - RNA, 23 nt, Artificial Sequence
  Synthetic oligonucleotide: CTLA4-3088
ugucuguuugcaugucagccuuc

SEQ ID NO: 48698 - RNA, 24 nt, Artificial Sequence
  Synthetic oligonucleotide: CTLA4-3089
cugucuguuugcaugucagccuuc

SEQ ID NO: 48699 - RNA, 18 nt, Artificial Sequence
  Synthetic oligonucleotide: CTLA4-3090
uuuauaaaguauaugaau

SEQ ID NO: 48700 - RNA, 19 nt, Artificial Sequence
  Synthetic oligonucleotide: CTLA4-3091
auuuauaaaguauaugaau

SEQ ID NO: 48701 - RNA, 20 nt, Artificial Sequence
  Synthetic oligonucleotide: CTLA4-1253
cauuuauaaaguauaugaau

SEQ ID NO: 48702 - RNA, 21 nt, Artificial Sequence
  Synthetic oligonucleotide: CTLA4-3092
ucauuuauaaaguauaugaau

SEQ ID NO: 48703 - RNA, 22 nt, Artificial Sequence
  Synthetic oligonucleotide: CTLA4-3093
uucauuuauaaaguauaugaau

SEQ ID NO: 48704 - RNA, 23 nt, Artificial Sequence
  Synthetic oligonucleotide: CTLA4-3094
auucauuuauaaaguauaugaau

SEQ ID NO: 48705 - RNA, 24 nt, Artificial Sequence
  Synthetic oligonucleotide: CTLA4-3095
aauucauuuauaaaguauaugaau

SEQ ID NO: 48706 - RNA, 18 nt, Artificial Sequence
  Synthetic oligonucleotide: CTLA4-3096
aaaacugaggaucugcau

SEQ ID NO: 48707 - RNA, 19 nt, Artificial Sequence
  Synthetic oligonucleotide: CTLA4-3097
gaaaacugaggaucugcau

SEQ ID NO: 48708 - RNA, 20 nt, Artificial Sequence
  Synthetic oligonucleotide: CTLA4-1260
ugaaaacugaggaucugcau

SEQ ID NO: 48709 - RNA, 21 nt, Artificial Sequence
  Synthetic oligonucleotide: CTLA4-3098
cugaaaacugaggaucugcau

SEQ ID NO: 48710 - RNA, 22 nt, Artificial Sequence
  Synthetic oligonucleotide: CTLA4-3099
gcugaaaacugaggaucugcau

SEQ ID NO: 48711 - RNA, 23 nt, Artificial Sequence
  Synthetic oligonucleotide: CTLA4-3100
agcugaaaacugaggaucugcau

SEQ ID NO: 48712 - RNA, 24 nt, Artificial Sequence
  Synthetic oligonucleotide: CTLA4-3101
gagcugaaaacugaggaucugcau

SEQ ID NO: 48713 - RNA, 18 nt, Artificial Sequence
  Synthetic oligonucleotide: CTLA4-3102
ugcuugaaaaauuuguau

SEQ ID NO: 48714 - RNA, 19 nt, Artificial Sequence
  Synthetic oligonucleotide: CTLA4-3103
cugcuugaaaaauuuguau

SEQ ID NO: 48715 - RNA, 20 nt, Artificial Sequence
  Synthetic oligonucleotide: CTLA4-1121
ucugcuugaaaaauuuguau

SEQ ID NO: 48716 - RNA, 21 nt, Artificial Sequence
  Synthetic oligonucleotide: CTLA4-3104
uucugcuugaaaaauuuguau

SEQ ID NO: 48717 - RNA, 22 nt, Artificial Sequence
  Synthetic oligonucleotide: CTLA4-3105
uuucugcuugaaaaauuuguau

SEQ ID NO: 48718 - RNA, 23 nt, Artificial Sequence
  Synthetic oligonucleotide: CTLA4-3106
uuuucugcuugaaaaauuuguau

SEQ ID NO: 48719 - RNA, 24 nt, Artificial Sequence
  Synthetic oligonucleotide: CTLA4-3107
auuuucugcuugaaaaauuuguau

SEQ ID NO: 48720 - RNA, 18 nt, Artificial Sequence
  Synthetic oligonucleotide: CTLA4-3108
auuuggguuggcuuuucu

SEQ ID NO: 48721 - RNA, 19 nt, Artificial Sequence
  Synthetic oligonucleotide: CTLA4-3109
cauuuggguuggcuuuucu

SEQ ID NO: 48722 - RNA, 20 nt, Artificial Sequence
  Synthetic oligonucleotide: CTLA4-1125
ucauuuggguuggcuuuucu

SEQ ID NO: 48723 - RNA, 21 nt, Artificial Sequence
  Synthetic oligonucleotide: CTLA4-3110
aucauuuggguuggcuuuucu

SEQ ID NO: 48724 - RNA, 22 nt, Artificial Sequence
  Synthetic oligonucleotide: CTLA4-3111
aaucauuuggguuggcuuuucu

SEQ ID NO: 48725 - RNA, 23 nt, Artificial Sequence
  Synthetic oligonucleotide: CTLA4-3112
gaaucauuuggguuggcuuuucu

SEQ ID NO: 48726 - RNA, 24 nt, Artificial Sequence
  Synthetic oligonucleotide: CTLA4-3113
ugaaucauuuggguuggcuuuucu

SEQ ID NO: 48727 - RNA, 18 nt, Artificial Sequence
  Synthetic oligonucleotide: CTLA4-3114
ccagucucauagaagggu

SEQ ID NO: 48728 - RNA, 19 nt, Artificial Sequence
  Synthetic oligonucleotide: CTLA4-3115
uccagucucauagaagggu

SEQ ID NO: 48729 - RNA, 20 nt, Artificial Sequence
  Synthetic oligonucleotide: CTLA4-1033
uuccagucucauagaagggu

SEQ ID NO: 48730 - RNA, 21 nt, Artificial Sequence
  Synthetic oligonucleotide: CTLA4-3116
cuuccagucucauagaagggu

SEQ ID NO: 48731 - RNA, 22 nt, Artificial Sequence
  Synthetic oligonucleotide: CTLA4-3117
acuuccagucucauagaagggu

SEQ ID NO: 48732 - RNA, 23 nt, Artificial Sequence
  Synthetic oligonucleotide: CTLA4-3118
cacuuccagucucauagaagggu

SEQ ID NO: 48733 - RNA, 24 nt, Artificial Sequence
  Synthetic oligonucleotide: CTLA4-3119
ucacuuccagucucauagaagggu

SEQ ID NO: 48734 - RNA, 18 nt, Artificial Sequence
  Synthetic oligonucleotide: CTLA4-3120
cuuucuuuauuaaaaugu

SEQ ID NO: 48735 - RNA, 19 nt, Artificial Sequence
  Synthetic oligonucleotide: CTLA4-3121
ucuuucuuuauuaaaaugu

SEQ ID NO: 48736 - RNA, 20 nt, Artificial Sequence
  Synthetic oligonucleotide: CTLA4-1115
uucuuucuuuauuaaaaugu

SEQ ID NO: 48737 - RNA, 21 nt, Artificial Sequence
  Synthetic oligonucleotide: CTLA4-3122
uuucuuucuuuauuaaaaugu

SEQ ID NO: 48738 - RNA, 22 nt, Artificial Sequence
  Synthetic oligonucleotide: CTLA4-3123
guuucuuucuuuauuaaaaugu

SEQ ID NO: 48739 - RNA, 23 nt, Artificial Sequence
  Synthetic oligonucleotide: CTLA4-3124
uguuucuuucuuuauuaaaaugu

SEQ ID NO: 48740 - RNA, 24 nt, Artificial Sequence
  Synthetic oligonucleotide: CTLA4-3125
auguuucuuucuuuauuaaaaugu

SEQ ID NO: 48741 - RNA, 18 nt, Artificial Sequence
  Synthetic oligonucleotide: CTLA4-3126
uccuaagugcacagaauu

SEQ ID NO: 48742 - RNA, 19 nt, Artificial Sequence
  Synthetic oligonucleotide: CTLA4-3127
auccuaagugcacagaauu

SEQ ID NO: 48743 - RNA, 20 nt, Artificial Sequence
  Synthetic oligonucleotide: CTLA4-3128
aauccuaagugcacagaauu

SEQ ID NO: 48744 - RNA, 21 nt, Artificial Sequence
  Synthetic oligonucleotide: CTLA4-3129
caauccuaagugcacagaauu

SEQ ID NO: 48745 - RNA, 22 nt, Artificial Sequence
  Synthetic oligonucleotide: CTLA4-3130
ucaauccuaagugcacagaauu

SEQ ID NO: 48746 - RNA, 23 nt, Artificial Sequence
  Synthetic oligonucleotide: CTLA4-3131
uucaauccuaagugcacagaauu

SEQ ID NO: 48747 - RNA, 24 nt, Artificial Sequence
  Synthetic oligonucleotide: CTLA4-3132
auucaauccuaagugcacagaauu

SEQ ID NO: 48748 - RNA, 18 nt, Artificial Sequence
  Synthetic oligonucleotide: CTLA4-3133
uagcuaguagaauugauu

SEQ ID NO: 48749 - RNA, 19 nt, Artificial Sequence
  Synthetic oligonucleotide: CTLA4-3134
uuagcuaguagaauugauu

SEQ ID NO: 48750 - RNA, 20 nt, Artificial Sequence
  Synthetic oligonucleotide: CTLA4-1258
auuagcuaguagaauugauu

SEQ ID NO: 48751 - RNA, 21 nt, Artificial Sequence
  Synthetic oligonucleotide: CTLA4-3135
aauuagcuaguagaauugauu

SEQ ID NO: 48752 - RNA, 22 nt, Artificial Sequence
  Synthetic oligonucleotide: CTLA4-3136
uaauuagcuaguagaauugauu

SEQ ID NO: 48753 - RNA, 23 nt, Artificial Sequence
  Synthetic oligonucleotide: CTLA4-3137
cuaauuagcuaguagaauugauu

SEQ ID NO: 48754 - RNA, 24 nt, Artificial Sequence
  Synthetic oligonucleotide: CTLA4-3138
gcuaauuagcuaguagaauugauu

SEQ ID NO: 48755 - RNA, 18 nt, Artificial Sequence
  Synthetic oligonucleotide: CTLA4-3139
acccagcucaaauguauu

SEQ ID NO: 48756 - RNA, 19 nt, Artificial Sequence
  Synthetic oligonucleotide: CTLA4-3140
aacccagcucaaauguauu

SEQ ID NO: 48757 - RNA, 20 nt, Artificial Sequence
  Synthetic oligonucleotide: CTLA4-1036
aaacccagcucaaauguauu

SEQ ID NO: 48758 - RNA, 21 nt, Artificial Sequence
  Synthetic oligonucleotide: CTLA4-3141
gaaacccagcucaaauguauu

SEQ ID NO: 48759 - RNA, 22 nt, Artificial Sequence
  Synthetic oligonucleotide: CTLA4-3142
ugaaacccagcucaaauguauu

SEQ ID NO: 48760 - RNA, 23 nt, Artificial Sequence
  Synthetic oligonucleotide: CTLA4-3143
cugaaacccagcucaaauguauu

SEQ ID NO: 48761 - RNA, 24 nt, Artificial Sequence
  Synthetic oligonucleotide: CTLA4-3144
ccugaaacccagcucaaauguauu

SEQ ID NO: 48762 - RNA, 18 nt, Artificial Sequence
  Synthetic oligonucleotide: CTLA4-3145
uuuuuuuuaaaggaacuu

SEQ ID NO: 48763 - RNA, 19 nt, Artificial Sequence
  Synthetic oligonucleotide: CTLA4-3146
auuuuuuuuaaaggaacuu

SEQ ID NO: 48764 - RNA, 20 nt, Artificial Sequence
  Synthetic oligonucleotide: CTLA4-1038
aauuuuuuuuaaaggaacuu

SEQ ID NO: 48765 - RNA, 21 nt, Artificial Sequence
  Synthetic oligonucleotide: CTLA4-3147
caauuuuuuuuaaaggaacuu

SEQ ID NO: 48766 - RNA, 22 nt, Artificial Sequence
  Synthetic oligonucleotide: CTLA4-3148
ucaauuuuuuuuaaaggaacuu

SEQ ID NO: 48767 - RNA, 23 nt, Artificial Sequence
  Synthetic oligonucleotide: CTLA4-3149
gucaauuuuuuuuaaaggaacuu

SEQ ID NO: 48768 - RNA, 24 nt, Artificial Sequence
  Synthetic oligonucleotide: CTLA4-3150
agucaauuuuuuuuaaaggaacuu

SEQ ID NO: 48769 - RNA, 18 nt, Artificial Sequence
  Synthetic oligonucleotide: CTLA4-3151
uacagcugucacaaauuu

SEQ ID NO: 48770 - RNA, 19 nt, Artificial Sequence
  Synthetic oligonucleotide: CTLA4-3152
cuacagcugucacaaauuu

SEQ ID NO: 48771 - RNA, 20 nt, Artificial Sequence
  Synthetic oligonucleotide: CTLA4-1118
ucuacagcugucacaaauuu

SEQ ID NO: 48772 - RNA, 21 nt, Artificial Sequence
  Synthetic oligonucleotide: CTLA4-3153
gucuacagcugucacaaauuu

SEQ ID NO: 48773 - RNA, 22 nt, Artificial Sequence
  Synthetic oligonucleotide: CTLA4-3154
ugucuacagcugucacaaauuu

SEQ ID NO: 48774 - RNA, 23 nt, Artificial Sequence
  Synthetic oligonucleotide: CTLA4-3155
cugucuacagcugucacaaauuu

SEQ ID NO: 48775 - RNA, 24 nt, Artificial Sequence
  Synthetic oligonucleotide: CTLA4-3156
ccugucuacagcugucacaaauuu

SEQ ID NO: 48776 - RNA, 18 nt, Artificial Sequence
  Synthetic oligonucleotide: CTLA4-3157
ugaaaacucuccagauuu

SEQ ID NO: 48777 - RNA, 19 nt, Artificial Sequence
  Synthetic oligonucleotide: CTLA4-3158
augaaaacucuccagauuu

SEQ ID NO: 48778 - RNA, 20 nt, Artificial Sequence
  Synthetic oligonucleotide: CTLA4-1116
uaugaaaacucuccagauuu

SEQ ID NO: 48779 - RNA, 21 nt, Artificial Sequence
  Synthetic oligonucleotide: CTLA4-3159
guaugaaaacucuccagauuu

SEQ ID NO: 48780 - RNA, 22 nt, Artificial Sequence
  Synthetic oligonucleotide: CTLA4-3160
uguaugaaaacucuccagauuu

SEQ ID NO: 48781 - RNA, 23 nt, Artificial Sequence
  Synthetic oligonucleotide: CTLA4-3161
auguaugaaaacucuccagauuu

SEQ ID NO: 48782 - RNA, 24 nt, Artificial Sequence
  Synthetic oligonucleotide: CTLA4-3162
aauguaugaaaacucuccagauuu

SEQ ID NO: 48783 - RNA, 18 nt, Artificial Sequence
  Synthetic oligonucleotide: CTLA4-3163
aaaaaagucuauccuuuu

SEQ ID NO: 48784 - RNA, 19 nt, Artificial Sequence
  Synthetic oligonucleotide: CTLA4-3164
aaaaaaagucuauccuuuu

SEQ ID NO: 48785 - RNA, 20 nt, Artificial Sequence
  Synthetic oligonucleotide: CTLA4-1122
aaaaaaaagucuauccuuuu

SEQ ID NO: 48786 - RNA, 21 nt, Artificial Sequence
  Synthetic oligonucleotide: CTLA4-3165
gaaaaaaaagucuauccuuuu

SEQ ID NO: 48787 - RNA, 22 nt, Artificial Sequence
  Synthetic oligonucleotide: CTLA4-3166
agaaaaaaaagucuauccuuuu

SEQ ID NO: 48788 - RNA, 23 nt, Artificial Sequence
  Synthetic oligonucleotide: CTLA4-3167
uagaaaaaaaagucuauccuuuu

SEQ ID NO: 48789 - RNA, 24 nt, Artificial Sequence
  Synthetic oligonucleotide: CTLA4-3168
uuagaaaaaaaagucuauccuuuu

SEQ ID NO: 48790 - RNA, 18 nt, Artificial Sequence
  Synthetic oligonucleotide: CTLA4-3169
uguugaguuaaggcuuuu

SEQ ID NO: 48791 - RNA, 19 nt, Artificial Sequence
  Synthetic oligonucleotide: CTLA4-3170
cuguugaguuaaggcuuuu

SEQ ID NO: 48792 - RNA, 20 nt, Artificial Sequence
  Synthetic oligonucleotide: CTLA4-1127
ucuguugaguuaaggcuuuu

SEQ ID NO: 48793 - RNA, 21 nt, Artificial Sequence
  Synthetic oligonucleotide: CTLA4-3171
cucuguugaguuaaggcuuuu

SEQ ID NO: 48794 - RNA, 22 nt, Artificial Sequence
  Synthetic oligonucleotide: CTLA4-3172
ucucuguugaguuaaggcuuuu

SEQ ID NO: 48795 - RNA, 23 nt, Artificial Sequence
  Synthetic oligonucleotide: CTLA4-3173
gucucuguugaguuaaggcuuuu

SEQ ID NO: 48796 - RNA, 24 nt, Artificial Sequence
  Synthetic oligonucleotide: CTLA4-3174
ugucucuguugaguuaaggcuuuu

SEQ ID NO: 48797 - RNA, 18 nt, Artificial Sequence
  Synthetic oligonucleotide: CTLA4-3175
caagcagaaaauucaaaa

SEQ ID NO: 48798 - RNA, 19 nt, Artificial Sequence
  Synthetic oligonucleotide: CTLA4-3176
ucaagcagaaaauucaaaa

SEQ ID NO: 48799 - RNA, 20 nt, Artificial Sequence
  Synthetic oligonucleotide: CTLA4-1228
uucaagcagaaaauucaaaa

SEQ ID NO: 48800 - RNA, 21 nt, Artificial Sequence
  Synthetic oligonucleotide: CTLA4-3177
uuucaagcagaaaauucaaaa

SEQ ID NO: 48801 - RNA, 22 nt, Artificial Sequence
  Synthetic oligonucleotide: CTLA4-3178
uuuucaagcagaaaauucaaaa

SEQ ID NO: 48802 - RNA, 23 nt, Artificial Sequence
  Synthetic oligonucleotide: CTLA4-3179
uuuuucaagcagaaaauucaaaa

SEQ ID NO: 48803 - RNA, 24 nt, Artificial Sequence
  Synthetic oligonucleotide: CTLA4-3180
auuuuucaagcagaaaauucaaaa

SEQ ID NO: 48804 - RNA, 18 nt, Artificial Sequence
  Synthetic oligonucleotide: CTLA4-3181
aaaaaaaagacaaggaaa

SEQ ID NO: 48805 - RNA, 19 nt, Artificial Sequence
  Synthetic oligonucleotide: CTLA4-3182
aaaaaaaaagacaaggaaa

SEQ ID NO: 48806 - RNA, 20 nt, Artificial Sequence
  Synthetic oligonucleotide: CTLA4-713
aaaaaaaaaagacaaggaaa

SEQ ID NO: 48807 - RNA, 21 nt, Artificial Sequence
  Synthetic oligonucleotide: CTLA4-3183
caaaaaaaaaagacaaggaaa

SEQ ID NO: 48808 - RNA, 22 nt, Artificial Sequence
  Synthetic oligonucleotide: CTLA4-3184
ccaaaaaaaaaagacaaggaaa

SEQ ID NO: 48809 - RNA, 23 nt, Artificial Sequence
  Synthetic oligonucleotide: CTLA4-3185
gccaaaaaaaaaagacaaggaaa

SEQ ID NO: 48810 - RNA, 24 nt, Artificial Sequence
  Synthetic oligonucleotide: CTLA4-3186
ugccaaaaaaaaaagacaaggaaa

SEQ ID NO: 48811 - RNA, 18 nt, Artificial Sequence
  Synthetic oligonucleotide: CTLA4-3187
uuaaaagccuuaacucaa

SEQ ID NO: 48812 - RNA, 19 nt, Artificial Sequence
  Synthetic oligonucleotide: CTLA4-3188
cuuaaaagccuuaacucaa

SEQ ID NO: 48813 - RNA, 20 nt, Artificial Sequence
  Synthetic oligonucleotide: CTLA4-1237
ucuuaaaagccuuaacucaa

SEQ ID NO: 48814 - RNA, 21 nt, Artificial Sequence
  Synthetic oligonucleotide: CTLA4-3189
uucuuaaaagccuuaacucaa

SEQ ID NO: 48815 - RNA, 22 nt, Artificial Sequence
  Synthetic oligonucleotide: CTLA4-3190
guucuuaaaagccuuaacucaa

SEQ ID NO: 48816 - RNA, 23 nt, Artificial Sequence
  Synthetic oligonucleotide: CTLA4-3191
uguucuuaaaagccuuaacucaa

SEQ ID NO: 48817 - RNA, 24 nt, Artificial Sequence
  Synthetic oligonucleotide: CTLA4-3192
guguucuuaaaagccuuaacucaa

SEQ ID NO: 48818 - RNA, 18 nt, Artificial Sequence
  Synthetic oligonucleotide: CTLA4-3193
aaaaaaaaagacaaggaa

SEQ ID NO: 48819 - RNA, 19 nt, Artificial Sequence
  Synthetic oligonucleotide: CTLA4-3194
aaaaaaaaaagacaaggaa

SEQ ID NO: 48820 - RNA, 20 nt, Artificial Sequence
  Synthetic oligonucleotide: CTLA4-1151
caaaaaaaaaagacaaggaa

SEQ ID NO: 48821 - RNA, 21 nt, Artificial Sequence
  Synthetic oligonucleotide: CTLA4-3195
ccaaaaaaaaaagacaaggaa

SEQ ID NO: 48822 - RNA, 22 nt, Artificial Sequence
  Synthetic oligonucleotide: CTLA4-3196
gccaaaaaaaaaagacaaggaa

SEQ ID NO: 48823 - RNA, 23 nt, Artificial Sequence
  Synthetic oligonucleotide: CTLA4-3197
ugccaaaaaaaaaagacaaggaa

SEQ ID NO: 48824 - RNA, 24 nt, Artificial Sequence
  Synthetic oligonucleotide: CTLA4-3198
uugccaaaaaaaaaagacaaggaa

SEQ ID NO: 48825 - RNA, 18 nt, Artificial Sequence
  Synthetic oligonucleotide: CTLA4-3199
gcaaacagacaguuguaa

SEQ ID NO: 48826 - RNA, 19 nt, Artificial Sequence
  Synthetic oligonucleotide: CTLA4-3200
ugcaaacagacaguuguaa

SEQ ID NO: 48827 - RNA, 20 nt, Artificial Sequence
  Synthetic oligonucleotide: CTLA4-3201
augcaaacagacaguuguaa

SEQ ID NO: 48828 - RNA, 21 nt, Artificial Sequence
  Synthetic oligonucleotide: CTLA4-3202
caugcaaacagacaguuguaa

SEQ ID NO: 48829 - RNA, 22 nt, Artificial Sequence
  Synthetic oligonucleotide: CTLA4-3203
acaugcaaacagacaguuguaa

SEQ ID NO: 48830 - RNA, 23 nt, Artificial Sequence
  Synthetic oligonucleotide: CTLA4-3204
gacaugcaaacagacaguuguaa

SEQ ID NO: 48831 - RNA, 24 nt, Artificial Sequence
  Synthetic oligonucleotide: CTLA4-3205
ugacaugcaaacagacaguuguaa

SEQ ID NO: 48832 - RNA, 18 nt, Artificial Sequence
  Synthetic oligonucleotide: CTLA4-3206
agacuggaagugauuuaa

SEQ ID NO: 48833 - RNA, 19 nt, Artificial Sequence
  Synthetic oligonucleotide: CTLA4-3207
gagacuggaagugauuuaa

SEQ ID NO: 48834 - RNA, 20 nt, Artificial Sequence
  Synthetic oligonucleotide: CTLA4-885
ugagacuggaagugauuuaa

SEQ ID NO: 48835 - RNA, 21 nt, Artificial Sequence
  Synthetic oligonucleotide: CTLA4-3208
augagacuggaagugauuuaa

SEQ ID NO: 48836 - RNA, 22 nt, Artificial Sequence
  Synthetic oligonucleotide: CTLA4-3209
uaugagacuggaagugauuuaa

SEQ ID NO: 48837 - RNA, 23 nt, Artificial Sequence
  Synthetic oligonucleotide: CTLA4-3210
cuaugagacuggaagugauuuaa

SEQ ID NO: 48838 - RNA, 24 nt, Artificial Sequence
  Synthetic oligonucleotide: CTLA4-3211
ucuaugagacuggaagugauuuaa

SEQ ID NO: 48839 - RNA, 18 nt, Artificial Sequence
  Synthetic oligonucleotide: CTLA4-3212
caaaaagaauuugaaaca

SEQ ID NO: 48840 - RNA, 19 nt, Artificial Sequence
  Synthetic oligonucleotide: CTLA4-3213
acaaaaagaauuugaaaca

SEQ ID NO: 48841 - RNA, 20 nt, Artificial Sequence
  Synthetic oligonucleotide: CTLA4-1223
aacaaaaagaauuugaaaca

SEQ ID NO: 48842 - RNA, 21 nt, Artificial Sequence
  Synthetic oligonucleotide: CTLA4-3214
uaacaaaaagaauuugaaaca

SEQ ID NO: 48843 - RNA, 22 nt, Artificial Sequence
  Synthetic oligonucleotide: CTLA4-3215
cuaacaaaaagaauuugaaaca

SEQ ID NO: 48844 - RNA, 23 nt, Artificial Sequence
  Synthetic oligonucleotide: CTLA4-3216
ucuaacaaaaagaauuugaaaca

SEQ ID NO: 48845 - RNA, 24 nt, Artificial Sequence
  Synthetic oligonucleotide: CTLA4-3217
aucuaacaaaaagaauuugaaaca

SEQ ID NO: 48846 - RNA, 18 nt, Artificial Sequence
  Synthetic oligonucleotide: CTLA4-3218
ugccaaaaaaaaaagaca

SEQ ID NO: 48847 - RNA, 19 nt, Artificial Sequence
  Synthetic oligonucleotide: CTLA4-3219
uugccaaaaaaaaaagaca

SEQ ID NO: 48848 - RNA, 20 nt, Artificial Sequence
  Synthetic oligonucleotide: CTLA4-712
auugccaaaaaaaaaagaca

SEQ ID NO: 48849 - RNA, 21 nt, Artificial Sequence
  Synthetic oligonucleotide: CTLA4-3220
aauugccaaaaaaaaaagaca

SEQ ID NO: 48850 - RNA, 22 nt, Artificial Sequence
  Synthetic oligonucleotide: CTLA4-3221
aaauugccaaaaaaaaaagaca

SEQ ID NO: 48851 - RNA, 23 nt, Artificial Sequence
  Synthetic oligonucleotide: CTLA4-3222
gaaauugccaaaaaaaaaagaca

SEQ ID NO: 48852 - RNA, 24 nt, Artificial Sequence
  Synthetic oligonucleotide: CTLA4-3223
ugaaauugccaaaaaaaaaagaca

SEQ ID NO: 48853 - RNA, 18 nt, Artificial Sequence
  Synthetic oligonucleotide: CTLA4-3224
agaguugaagaaggucca

SEQ ID NO: 48854 - RNA, 19 nt, Artificial Sequence
  Synthetic oligonucleotide: CTLA4-3225
cagaguugaagaaggucca

SEQ ID NO: 48855 - RNA, 20 nt, Artificial Sequence
  Synthetic oligonucleotide: CTLA4-1233
acagaguugaagaaggucca

SEQ ID NO: 48856 - RNA, 21 nt, Artificial Sequence
  Synthetic oligonucleotide: CTLA4-3226
aacagaguugaagaaggucca

SEQ ID NO: 48857 - RNA, 22 nt, Artificial Sequence
  Synthetic oligonucleotide: CTLA4-3227
aaacagaguugaagaaggucca

SEQ ID NO: 48858 - RNA, 23 nt, Artificial Sequence
  Synthetic oligonucleotide: CTLA4-3228
aaaacagaguugaagaaggucca

SEQ ID NO: 48859 - RNA, 24 nt, Artificial Sequence
  Synthetic oligonucleotide: CTLA4-3229
caaaacagaguugaagaaggucca

SEQ ID NO: 48860 - RNA, 18 nt, Artificial Sequence
  Synthetic oligonucleotide: CTLA4-3230
uaaagaaagaaacauuca

SEQ ID NO: 48861 - RNA, 19 nt, Artificial Sequence
  Synthetic oligonucleotide: CTLA4-3231
auaaagaaagaaacauuca

SEQ ID NO: 48862 - RNA, 20 nt, Artificial Sequence
  Synthetic oligonucleotide: CTLA4-762
aauaaagaaagaaacauuca

SEQ ID NO: 48863 - RNA, 21 nt, Artificial Sequence
  Synthetic oligonucleotide: CTLA4-3232
uaauaaagaaagaaacauuca

SEQ ID NO: 48864 - RNA, 22 nt, Artificial Sequence
  Synthetic oligonucleotide: CTLA4-3233
uuaauaaagaaagaaacauuca

SEQ ID NO: 48865 - RNA, 23 nt, Artificial Sequence
  Synthetic oligonucleotide: CTLA4-3234
uuuaauaaagaaagaaacauuca

SEQ ID NO: 48866 - RNA, 24 nt, Artificial Sequence
  Synthetic oligonucleotide: CTLA4-3235
uuuuaauaaagaaagaaacauuca

SEQ ID NO: 48867 - RNA, 18 nt, Artificial Sequence
  Synthetic oligonucleotide: CTLA4-3236
gacaaggaaaaggaaaga

SEQ ID NO: 48868 - RNA, 19 nt, Artificial Sequence
  Synthetic oligonucleotide: CTLA4-3237
agacaaggaaaaggaaaga

SEQ ID NO: 48869 - RNA, 20 nt, Artificial Sequence
  Synthetic oligonucleotide: CTLA4-1154
aagacaaggaaaaggaaaga

SEQ ID NO: 48870 - RNA, 21 nt, Artificial Sequence
  Synthetic oligonucleotide: CTLA4-3238
aaagacaaggaaaaggaaaga

SEQ ID NO: 48871 - RNA, 22 nt, Artificial Sequence
  Synthetic oligonucleotide: CTLA4-3239
aaaagacaaggaaaaggaaaga

SEQ ID NO: 48872 - RNA, 23 nt, Artificial Sequence
  Synthetic oligonucleotide: CTLA4-3240
aaaaagacaaggaaaaggaaaga

SEQ ID NO: 48873 - RNA, 24 nt, Artificial Sequence
  Synthetic oligonucleotide: CTLA4-3241
aaaaaagacaaggaaaaggaaaga

SEQ ID NO: 48874 - RNA, 18 nt, Artificial Sequence
  Synthetic oligonucleotide: CTLA4-3242
cauacauuuuaauaaaga

SEQ ID NO: 48875 - RNA, 19 nt, Artificial Sequence
  Synthetic oligonucleotide: CTLA4-3243
ucauacauuuuaauaaaga

SEQ ID NO: 48876 - RNA, 20 nt, Artificial Sequence
  Synthetic oligonucleotide: CTLA4-1217
uucauacauuuuaauaaaga

SEQ ID NO: 48877 - RNA, 21 nt, Artificial Sequence
  Synthetic oligonucleotide: CTLA4-3244
uuucauacauuuuaauaaaga

SEQ ID NO: 48878 - RNA, 22 nt, Artificial Sequence
  Synthetic oligonucleotide: CTLA4-3245
uuuucauacauuuuaauaaaga

SEQ ID NO: 48879 - RNA, 23 nt, Artificial Sequence
  Synthetic oligonucleotide: CTLA4-3246
guuuucauacauuuuaauaaaga

SEQ ID NO: 48880 - RNA, 24 nt, Artificial Sequence
  Synthetic oligonucleotide: CTLA4-3247
aguuuucauacauuuuaauaaaga

SEQ ID NO: 48881 - RNA, 18 nt, Artificial Sequence
  Synthetic oligonucleotide: CTLA4-3248
acuggaagugauuuaaga

SEQ ID NO: 48882 - RNA, 19 nt, Artificial Sequence
  Synthetic oligonucleotide: CTLA4-3249
gacuggaagugauuuaaga

SEQ ID NO: 48883 - RNA, 20 nt, Artificial Sequence
  Synthetic oligonucleotide: CTLA4-518
agacuggaagugauuuaaga

SEQ ID NO: 48884 - RNA, 21 nt, Artificial Sequence
  Synthetic oligonucleotide: CTLA4-3250
gagacuggaagugauuuaaga

SEQ ID NO: 48885 - RNA, 22 nt, Artificial Sequence
  Synthetic oligonucleotide: CTLA4-3251
ugagacuggaagugauuuaaga

SEQ ID NO: 48886 - RNA, 23 nt, Artificial Sequence
  Synthetic oligonucleotide: CTLA4-3252
augagacuggaagugauuuaaga

SEQ ID NO: 48887 - RNA, 24 nt, Artificial Sequence
  Synthetic oligonucleotide: CTLA4-3253
uaugagacuggaagugauuuaaga

SEQ ID NO: 48888 - RNA, 18 nt, Artificial Sequence
  Synthetic oligonucleotide: CTLA4-3254
ugccucugguuuugcaga

SEQ ID NO: 48889 - RNA, 19 nt, Artificial Sequence
  Synthetic oligonucleotide: CTLA4-3255
cugccucugguuuugcaga

SEQ ID NO: 48890 - RNA, 20 nt, Artificial Sequence
  Synthetic oligonucleotide: CTLA4-769
gcugccucugguuuugcaga

SEQ ID NO: 48891 - RNA, 21 nt, Artificial Sequence
  Synthetic oligonucleotide: CTLA4-3256
agcugccucugguuuugcaga

SEQ ID NO: 48892 - RNA, 22 nt, Artificial Sequence
  Synthetic oligonucleotide: CTLA4-3257
aagcugccucugguuuugcaga

SEQ ID NO: 48893 - RNA, 23 nt, Artificial Sequence
  Synthetic oligonucleotide: CTLA4-3258
gaagcugccucugguuuugcaga

SEQ ID NO: 48894 - RNA, 24 nt, Artificial Sequence
  Synthetic oligonucleotide: CTLA4-3259
agaagcugccucugguuuugcaga

SEQ ID NO: 48895 - RNA, 18 nt, Artificial Sequence
  Synthetic oligonucleotide: CTLA4-3260
ucagacccuucuaugaga

SEQ ID NO: 48896 - RNA, 19 nt, Artificial Sequence
  Synthetic oligonucleotide: CTLA4-3261
uucagacccuucuaugaga

SEQ ID NO: 48897 - RNA, 20 nt, Artificial Sequence
  Synthetic oligonucleotide: CTLA4-882
uuucagacccuucuaugaga

SEQ ID NO: 48898 - RNA, 21 nt, Artificial Sequence
  Synthetic oligonucleotide: CTLA4-3262
auuucagacccuucuaugaga

SEQ ID NO: 48899 - RNA, 22 nt, Artificial Sequence
  Synthetic oligonucleotide: CTLA4-3263
aauuucagacccuucuaugaga

SEQ ID NO: 48900 - RNA, 23 nt, Artificial Sequence
  Synthetic oligonucleotide: CTLA4-3264
caauuucagacccuucuaugaga

SEQ ID NO: 48901 - RNA, 24 nt, Artificial Sequence
  Synthetic oligonucleotide: CTLA4-3265
gcaauuucagacccuucuaugaga

SEQ ID NO: 48902 - RNA, 18 nt, Artificial Sequence
  Synthetic oligonucleotide: CTLA4-3266
auuugugacagcuguaga

SEQ ID NO: 48903 - RNA, 19 nt, Artificial Sequence
  Synthetic oligonucleotide: CTLA4-3267
aauuugugacagcuguaga

SEQ ID NO: 48904 - RNA, 20 nt, Artificial Sequence
  Synthetic oligonucleotide: CTLA4-1226
aaauuugugacagcuguaga

SEQ ID NO: 48905 - RNA, 21 nt, Artificial Sequence
  Synthetic oligonucleotide: CTLA4-3268
uaaauuugugacagcuguaga

SEQ ID NO: 48906 - RNA, 22 nt, Artificial Sequence
  Synthetic oligonucleotide: CTLA4-3269
uuaaauuugugacagcuguaga

SEQ ID NO: 48907 - RNA, 23 nt, Artificial Sequence
  Synthetic oligonucleotide: CTLA4-3270
cuuaaauuugugacagcuguaga

SEQ ID NO: 48908 - RNA, 24 nt, Artificial Sequence
  Synthetic oligonucleotide: CTLA4-3271
ccuuaaauuugugacagcuguaga

SEQ ID NO: 48909 - RNA, 18 nt, Artificial Sequence
  Synthetic oligonucleotide: CTLA4-3272
aaaagacaaggaaaagga

SEQ ID NO: 48910 - RNA, 19 nt, Artificial Sequence
  Synthetic oligonucleotide: CTLA4-3273
aaaaagacaaggaaaagga

SEQ ID NO: 48911 - RNA, 20 nt, Artificial Sequence
  Synthetic oligonucleotide: CTLA4-1153
aaaaaagacaaggaaaagga

SEQ ID NO: 48912 - RNA, 21 nt, Artificial Sequence
  Synthetic oligonucleotide: CTLA4-3274
aaaaaaagacaaggaaaagga

SEQ ID NO: 48913 - RNA, 22 nt, Artificial Sequence
  Synthetic oligonucleotide: CTLA4-3275
aaaaaaaagacaaggaaaagga

SEQ ID NO: 48914 - RNA, 23 nt, Artificial Sequence
  Synthetic oligonucleotide: CTLA4-3276
aaaaaaaaagacaaggaaaagga

SEQ ID NO: 48915 - RNA, 24 nt, Artificial Sequence
  Synthetic oligonucleotide: CTLA4-3277
aaaaaaaaaagacaaggaaaagga

SEQ ID NO: 48916 - RNA, 18 nt, Artificial Sequence
  Synthetic oligonucleotide: CTLA4-3278
uuuucauacauuuuaaua

SEQ ID NO: 48917 - RNA, 19 nt, Artificial Sequence
  Synthetic oligonucleotide: CTLA4-3279
guuuucauacauuuuaaua

SEQ ID NO: 48918 - RNA, 20 nt, Artificial Sequence
  Synthetic oligonucleotide: CTLA4-1218
aguuuucauacauuuuaaua

SEQ ID NO: 48919 - RNA, 21 nt, Artificial Sequence
  Synthetic oligonucleotide: CTLA4-3280
gaguuuucauacauuuuaaua

SEQ ID NO: 48920 - RNA, 22 nt, Artificial Sequence
  Synthetic oligonucleotide: CTLA4-3281
agaguuuucauacauuuuaaua

SEQ ID NO: 48921 - RNA, 23 nt, Artificial Sequence
  Synthetic oligonucleotide: CTLA4-3282
gagaguuuucauacauuuuaaua

SEQ ID NO: 48922 - RNA, 24 nt, Artificial Sequence
  Synthetic oligonucleotide: CTLA4-3283
ggagaguuuucauacauuuuaaua

SEQ ID NO: 48923 - RNA, 18 nt, Artificial Sequence
  Synthetic oligonucleotide: CTLA4-3284
augugaguugguuuagua

SEQ ID NO: 48924 - RNA, 19 nt, Artificial Sequence
  Synthetic oligonucleotide: CTLA4-3285
caugugaguugguuuagua

SEQ ID NO: 48925 - RNA, 20 nt, Artificial Sequence
  Synthetic oligonucleotide: CTLA4-880
gcaugugaguugguuuagua

SEQ ID NO: 48926 - RNA, 18 nt, Artificial Sequence
  Synthetic oligonucleotide: CTLA4-3286
cagcuuguuuaaaaugua

SEQ ID NO: 48927 - RNA, 19 nt, Artificial Sequence
  Synthetic oligonucleotide: CTLA4-3287
ccagcuuguuuaaaaugua

SEQ ID NO: 48928 - RNA, 20 nt, Artificial Sequence
  Synthetic oligonucleotide: CTLA4-707
gccagcuuguuuaaaaugua

SEQ ID NO: 48929 - RNA, 21 nt, Artificial Sequence
  Synthetic oligonucleotide: CTLA4-3288
agccagcuuguuuaaaaugua

SEQ ID NO: 48930 - RNA, 22 nt, Artificial Sequence
  Synthetic oligonucleotide: CTLA4-3289
uagccagcuuguuuaaaaugua

SEQ ID NO: 48931 - RNA, 23 nt, Artificial Sequence
  Synthetic oligonucleotide: CTLA4-3290
uuagccagcuuguuuaaaaugua

SEQ ID NO: 48932 - RNA, 24 nt, Artificial Sequence
  Synthetic oligonucleotide: CTLA4-3291
auuagccagcuuguuuaaaaugua

SEQ ID NO: 48933 - RNA, 18 nt, Artificial Sequence
  Synthetic oligonucleotide: CTLA4-3292
aacauaguugauaccuua

SEQ ID NO: 48934 - RNA, 19 nt, Artificial Sequence
  Synthetic oligonucleotide: CTLA4-3293
aaacauaguugauaccuua

SEQ ID NO: 48935 - RNA, 20 nt, Artificial Sequence
  Synthetic oligonucleotide: CTLA4-2143
aaaacauaguugauaccuua

SEQ ID NO: 48936 - RNA, 21 nt, Artificial Sequence
  Synthetic oligonucleotide: CTLA4-3294
aaaaacauaguugauaccuua

SEQ ID NO: 48937 - RNA, 22 nt, Artificial Sequence
  Synthetic oligonucleotide: CTLA4-3295
caaaaacauaguugauaccuua

SEQ ID NO: 48938 - RNA, 23 nt, Artificial Sequence
  Synthetic oligonucleotide: CTLA4-3296
acaaaaacauaguugauaccuua

SEQ ID NO: 48939 - RNA, 24 nt, Artificial Sequence
  Synthetic oligonucleotide: CTLA4-3297
aacaaaaacauaguugauaccuua

SEQ ID NO: 48940 - RNA, 18 nt, Artificial Sequence
  Synthetic oligonucleotide: CTLA4-3298
caaacagacaguuguaac

SEQ ID NO: 48941 - RNA, 19 nt, Artificial Sequence
  Synthetic oligonucleotide: CTLA4-3299
gcaaacagacaguuguaac

SEQ ID NO: 48942 - RNA, 20 nt, Artificial Sequence
  Synthetic oligonucleotide: CTLA4-2145
ugcaaacagacaguuguaac

SEQ ID NO: 48943 - RNA, 21 nt, Artificial Sequence
  Synthetic oligonucleotide: CTLA4-3300
augcaaacagacaguuguaac

SEQ ID NO: 48944 - RNA, 22 nt, Artificial Sequence
  Synthetic oligonucleotide: CTLA4-3301
caugcaaacagacaguuguaac

SEQ ID NO: 48945 - RNA, 23 nt, Artificial Sequence
  Synthetic oligonucleotide: CTLA4-3302
acaugcaaacagacaguuguaac

SEQ ID NO: 48946 - RNA, 24 nt, Artificial Sequence
  Synthetic oligonucleotide: CTLA4-3303
gacaugcaaacagacaguuguaac

SEQ ID NO: 48947 - RNA, 18 nt, Artificial Sequence
  Synthetic oligonucleotide: CTLA4-3304
uugccaaaaaaaaaagac

SEQ ID NO: 48948 - RNA, 19 nt, Artificial Sequence
  Synthetic oligonucleotide: CTLA4-3305
auugccaaaaaaaaaagac

SEQ ID NO: 48949 - RNA, 20 nt, Artificial Sequence
  Synthetic oligonucleotide: CTLA4-1149
aauugccaaaaaaaaaagac

SEQ ID NO: 48950 - RNA, 21 nt, Artificial Sequence
  Synthetic oligonucleotide: CTLA4-3306
aaauugccaaaaaaaaaagac

SEQ ID NO: 48951 - RNA, 22 nt, Artificial Sequence
  Synthetic oligonucleotide: CTLA4-3307
gaaauugccaaaaaaaaaagac

SEQ ID NO: 48952 - RNA, 23 nt, Artificial Sequence
  Synthetic oligonucleotide: CTLA4-3308
ugaaauugccaaaaaaaaaagac

SEQ ID NO: 48953 - RNA, 24 nt, Artificial Sequence
  Synthetic oligonucleotide: CTLA4-3309
uugaaauugccaaaaaaaaaagac

SEQ ID NO: 48954 - RNA, 18 nt, Artificial Sequence
  Synthetic oligonucleotide: CTLA4-3310
cagacccuucuaugagac

SEQ ID NO: 48955 - RNA, 19 nt, Artificial Sequence
  Synthetic oligonucleotide: CTLA4-3311
ucagacccuucuaugagac

SEQ ID NO: 48956 - RNA, 20 nt, Artificial Sequence
  Synthetic oligonucleotide: CTLA4-516
uucagacccuucuaugagac

SEQ ID NO: 48957 - RNA, 21 nt, Artificial Sequence
  Synthetic oligonucleotide: CTLA4-3312
uuucagacccuucuaugagac

SEQ ID NO: 48958 - RNA, 22 nt, Artificial Sequence
  Synthetic oligonucleotide: CTLA4-3313
auuucagacccuucuaugagac

SEQ ID NO: 48959 - RNA, 23 nt, Artificial Sequence
  Synthetic oligonucleotide: CTLA4-3314
aauuucagacccuucuaugagac

SEQ ID NO: 48960 - RNA, 24 nt, Artificial Sequence
  Synthetic oligonucleotide: CTLA4-3315
caauuucagacccuucuaugagac

SEQ ID NO: 48961 - RNA, 18 nt, Artificial Sequence
  Synthetic oligonucleotide: CTLA4-3316
auugacuuaagcaaaucc

SEQ ID NO: 48962 - RNA, 19 nt, Artificial Sequence
  Synthetic oligonucleotide: CTLA4-3317
aauugacuuaagcaaaucc

SEQ ID NO: 48963 - RNA, 20 nt, Artificial Sequence
  Synthetic oligonucleotide: CTLA4-2148
aaauugacuuaagcaaaucc

SEQ ID NO: 48964 - RNA, 21 nt, Artificial Sequence
  Synthetic oligonucleotide: CTLA4-3318
aaaauugacuuaagcaaaucc

SEQ ID NO: 48965 - RNA, 22 nt, Artificial Sequence
  Synthetic oligonucleotide: CTLA4-3319
aaaaauugacuuaagcaaaucc

SEQ ID NO: 48966 - RNA, 23 nt, Artificial Sequence
  Synthetic oligonucleotide: CTLA4-3320
aaaaaauugacuuaagcaaaucc

SEQ ID NO: 48967 - RNA, 24 nt, Artificial Sequence
  Synthetic oligonucleotide: CTLA4-3321
aaaaaaauugacuuaagcaaaucc

SEQ ID NO: 48968 - RNA, 18 nt, Artificial Sequence
  Synthetic oligonucleotide: CTLA4-3322
ggggaaccuguaauaugc

SEQ ID NO: 48969 - RNA, 19 nt, Artificial Sequence
  Synthetic oligonucleotide: CTLA4-3323
uggggaaccuguaauaugc

SEQ ID NO: 48970 - RNA, 20 nt, Artificial Sequence
  Synthetic oligonucleotide: CTLA4-3324
auggggaaccuguaauaugc

SEQ ID NO: 48971 - RNA, 21 nt, Artificial Sequence
  Synthetic oligonucleotide: CTLA4-3325
cauggggaaccuguaauaugc

SEQ ID NO: 48972 - RNA, 22 nt, Artificial Sequence
  Synthetic oligonucleotide: CTLA4-3326
ucauggggaaccuguaauaugc

SEQ ID NO: 48973 - RNA, 23 nt, Artificial Sequence
  Synthetic oligonucleotide: CTLA4-3327
uucauggggaaccuguaauaugc

SEQ ID NO: 48974 - RNA, 24 nt, Artificial Sequence
  Synthetic oligonucleotide: CTLA4-3328
auucauggggaaccuguaauaugc

SEQ ID NO: 48975 - RNA, 18 nt, Artificial Sequence
  Synthetic oligonucleotide: CTLA4-3329
aauugacuuaagcaaauc

SEQ ID NO: 48976 - RNA, 19 nt, Artificial Sequence
  Synthetic oligonucleotide: CTLA4-3330
aaauugacuuaagcaaauc

SEQ ID NO: 48977 - RNA, 20 nt, Artificial Sequence
  Synthetic oligonucleotide: CTLA4-3331
aaaauugacuuaagcaaauc

SEQ ID NO: 48978 - RNA, 21 nt, Artificial Sequence
  Synthetic oligonucleotide: CTLA4-3332
aaaaauugacuuaagcaaauc

SEQ ID NO: 48979 - RNA, 22 nt, Artificial Sequence
  Synthetic oligonucleotide: CTLA4-3333
aaaaaauugacuuaagcaaauc

SEQ ID NO: 48980 - RNA, 23 nt, Artificial Sequence
  Synthetic oligonucleotide: CTLA4-3334
aaaaaaauugacuuaagcaaauc

SEQ ID NO: 48981 - RNA, 24 nt, Artificial Sequence
  Synthetic oligonucleotide: CTLA4-3335
aaaaaaaauugacuuaagcaaauc

SEQ ID NO: 48982 - RNA, 18 nt, Artificial Sequence
  Synthetic oligonucleotide: CTLA4-3336
gaggaccuuccuuaaauc

SEQ ID NO: 48983 - RNA, 19 nt, Artificial Sequence
  Synthetic oligonucleotide: CTLA4-3337
ugaggaccuuccuuaaauc

SEQ ID NO: 48984 - RNA, 20 nt, Artificial Sequence
  Synthetic oligonucleotide: CTLA4-763
uugaggaccuuccuuaaauc

SEQ ID NO: 48985 - RNA, 21 nt, Artificial Sequence
  Synthetic oligonucleotide: CTLA4-3338
auugaggaccuuccuuaaauc

SEQ ID NO: 48986 - RNA, 22 nt, Artificial Sequence
  Synthetic oligonucleotide: CTLA4-3339
cauugaggaccuuccuuaaauc

SEQ ID NO: 48987 - RNA, 23 nt, Artificial Sequence
  Synthetic oligonucleotide: CTLA4-3340
acauugaggaccuuccuuaaauc

SEQ ID NO: 48988 - RNA, 24 nt, Artificial Sequence
  Synthetic oligonucleotide: CTLA4-3341
aacauugaggaccuuccuuaaauc

SEQ ID NO: 48989 - RNA, 18 nt, Artificial Sequence
  Synthetic oligonucleotide: CTLA4-3342
auaaagaaagaaacauuc

SEQ ID NO: 48990 - RNA, 19 nt, Artificial Sequence
  Synthetic oligonucleotide: CTLA4-3343
aauaaagaaagaaacauuc

SEQ ID NO: 48991 - RNA, 20 nt, Artificial Sequence
  Synthetic oligonucleotide: CTLA4-1216
uaauaaagaaagaaacauuc

SEQ ID NO: 48992 - RNA, 21 nt, Artificial Sequence
  Synthetic oligonucleotide: CTLA4-3344
uuaauaaagaaagaaacauuc

SEQ ID NO: 48993 - RNA, 22 nt, Artificial Sequence
  Synthetic oligonucleotide: CTLA4-3345
uuuaauaaagaaagaaacauuc

SEQ ID NO: 48994 - RNA, 23 nt, Artificial Sequence
  Synthetic oligonucleotide: CTLA4-3346
uuuuaauaaagaaagaaacauuc

SEQ ID NO: 48995 - RNA, 24 nt, Artificial Sequence
  Synthetic oligonucleotide: CTLA4-3347
auuuuaauaaagaaagaaacauuc

SEQ ID NO: 48996 - RNA, 18 nt, Artificial Sequence
  Synthetic oligonucleotide: CTLA4-3348
agccaacccaaaugauuc

SEQ ID NO: 48997 - RNA, 19 nt, Artificial Sequence
  Synthetic oligonucleotide: CTLA4-3349
aagccaacccaaaugauuc

SEQ ID NO: 48998 - RNA, 20 nt, Artificial Sequence
  Synthetic oligonucleotide: CTLA4-1232
aaagccaacccaaaugauuc

SEQ ID NO: 48999 - RNA, 21 nt, Artificial Sequence
  Synthetic oligonucleotide: CTLA4-3350
aaaagccaacccaaaugauuc

SEQ ID NO: 49000 - RNA, 22 nt, Artificial Sequence
  Synthetic oligonucleotide: CTLA4-3351
gaaaagccaacccaaaugauuc

SEQ ID NO: 49001 - RNA, 23 nt, Artificial Sequence
  Synthetic oligonucleotide: CTLA4-3352
agaaaagccaacccaaaugauuc

SEQ ID NO: 49002 - RNA, 24 nt, Artificial Sequence
  Synthetic oligonucleotide: CTLA4-3353
aagaaaagccaacccaaaugauuc

SEQ ID NO: 49003 - RNA, 18 nt, Artificial Sequence
  Synthetic oligonucleotide: CTLA4-3354
gauaccuuaaggggcuuc

SEQ ID NO: 49004 - RNA, 19 nt, Artificial Sequence
  Synthetic oligonucleotide: CTLA4-3355
ugauaccuuaaggggcuuc

SEQ ID NO: 49005 - RNA, 20 nt, Artificial Sequence
  Synthetic oligonucleotide: CTLA4-3356
uugauaccuuaaggggcuuc

SEQ ID NO: 49006 - RNA, 21 nt, Artificial Sequence
  Synthetic oligonucleotide: CTLA4-3357
guugauaccuuaaggggcuuc

SEQ ID NO: 49007 - RNA, 22 nt, Artificial Sequence
  Synthetic oligonucleotide: CTLA4-3358
aguugauaccuuaaggggcuuc

SEQ ID NO: 49008 - RNA, 23 nt, Artificial Sequence
  Synthetic oligonucleotide: CTLA4-3359
uaguugauaccuuaaggggcuuc

SEQ ID NO: 49009 - RNA, 24 nt, Artificial Sequence
  Synthetic oligonucleotide: CTLA4-3360
auaguugauaccuuaaggggcuuc

SEQ ID NO: 49010 - RNA, 18 nt, Artificial Sequence
  Synthetic oligonucleotide: CTLA4-3361
uaauacaaauuuuucaag

SEQ ID NO: 49011 - RNA, 19 nt, Artificial Sequence
  Synthetic oligonucleotide: CTLA4-3362
cuaauacaaauuuuucaag

SEQ ID NO: 49012 - RNA, 20 nt, Artificial Sequence
  Synthetic oligonucleotide: CTLA4-1229
ucuaauacaaauuuuucaag

SEQ ID NO: 49013 - RNA, 21 nt, Artificial Sequence
  Synthetic oligonucleotide: CTLA4-3363
uucuaauacaaauuuuucaag

SEQ ID NO: 49014 - RNA, 22 nt, Artificial Sequence
  Synthetic oligonucleotide: CTLA4-3364
uuucuaauacaaauuuuucaag

SEQ ID NO: 49015 - RNA, 23 nt, Artificial Sequence
  Synthetic oligonucleotide: CTLA4-3365
uuuucuaauacaaauuuuucaag

SEQ ID NO: 49016 - RNA, 24 nt, Artificial Sequence
  Synthetic oligonucleotide: CTLA4-3366
uuuuucuaauacaaauuuuucaag

SEQ ID NO: 49017 - RNA, 18 nt, Artificial Sequence
  Synthetic oligonucleotide: CTLA4-3367
gacuggaagugauuuaag

SEQ ID NO: 49018 - RNA, 19 nt, Artificial Sequence
  Synthetic oligonucleotide: CTLA4-3368
agacuggaagugauuuaag

SEQ ID NO: 49019 - RNA, 20 nt, Artificial Sequence
  Synthetic oligonucleotide: CTLA4-517
gagacuggaagugauuuaag

SEQ ID NO: 49020 - RNA, 21 nt, Artificial Sequence
  Synthetic oligonucleotide: CTLA4-3369
ugagacuggaagugauuuaag

SEQ ID NO: 49021 - RNA, 22 nt, Artificial Sequence
  Synthetic oligonucleotide: CTLA4-3370
augagacuggaagugauuuaag

SEQ ID NO: 49022 - RNA, 23 nt, Artificial Sequence
  Synthetic oligonucleotide: CTLA4-3371
uaugagacuggaagugauuuaag

SEQ ID NO: 49023 - RNA, 24 nt, Artificial Sequence
  Synthetic oligonucleotide: CTLA4-3372
cuaugagacuggaagugauuuaag

SEQ ID NO: 49024 - RNA, 18 nt, Artificial Sequence
  Synthetic oligonucleotide: CTLA4-3373
cugccucugguuuugcag

SEQ ID NO: 49025 - RNA, 19 nt, Artificial Sequence
  Synthetic oligonucleotide: CTLA4-3374
gcugccucugguuuugcag

SEQ ID NO: 49026 - RNA, 20 nt, Artificial Sequence
  Synthetic oligonucleotide: CTLA4-1240
agcugccucugguuuugcag

SEQ ID NO: 49027 - RNA, 21 nt, Artificial Sequence
  Synthetic oligonucleotide: CTLA4-3375
aagcugccucugguuuugcag

SEQ ID NO: 49028 - RNA, 22 nt, Artificial Sequence
  Synthetic oligonucleotide: CTLA4-3376
gaagcugccucugguuuugcag

SEQ ID NO: 49029 - RNA, 23 nt, Artificial Sequence
  Synthetic oligonucleotide: CTLA4-3377
agaagcugccucugguuuugcag

SEQ ID NO: 49030 - RNA, 24 nt, Artificial Sequence
  Synthetic oligonucleotide: CTLA4-3378
aagaagcugccucugguuuugcag

SEQ ID NO: 49031 - RNA, 18 nt, Artificial Sequence
  Synthetic oligonucleotide: CTLA4-3379
aacagagacaaaacagag

SEQ ID NO: 49032 - RNA, 19 nt, Artificial Sequence
  Synthetic oligonucleotide: CTLA4-3380
caacagagacaaaacagag

SEQ ID NO: 49033 - RNA, 20 nt, Artificial Sequence
  Synthetic oligonucleotide: CTLA4-1235
ucaacagagacaaaacagag

SEQ ID NO: 49034 - RNA, 21 nt, Artificial Sequence
  Synthetic oligonucleotide: CTLA4-3381
cucaacagagacaaaacagag

SEQ ID NO: 49035 - RNA, 22 nt, Artificial Sequence
  Synthetic oligonucleotide: CTLA4-3382
acucaacagagacaaaacagag

SEQ ID NO: 49036 - RNA, 23 nt, Artificial Sequence
  Synthetic oligonucleotide: CTLA4-3383
aacucaacagagacaaaacagag

SEQ ID NO: 49037 - RNA, 24 nt, Artificial Sequence
  Synthetic oligonucleotide: CTLA4-3384
uaacucaacagagacaaaacagag

SEQ ID NO: 49038 - RNA, 18 nt, Artificial Sequence
  Synthetic oligonucleotide: CTLA4-3385
gcaugugaguugguuuag

SEQ ID NO: 49039 - RNA, 19 nt, Artificial Sequence
  Synthetic oligonucleotide: CTLA4-3386
ugcaugugaguugguuuag

SEQ ID NO: 49040 - RNA, 20 nt, Artificial Sequence
  Synthetic oligonucleotide: CTLA4-879
augcaugugaguugguuuag

SEQ ID NO: 49041 - RNA, 18 nt, Artificial Sequence
  Synthetic oligonucleotide: CTLA4-3387
uuugagcuggguuucagg

SEQ ID NO: 49042 - RNA, 19 nt, Artificial Sequence
  Synthetic oligonucleotide: CTLA4-3388
auuugagcuggguuucagg

SEQ ID NO: 49043 - RNA, 20 nt, Artificial Sequence
  Synthetic oligonucleotide: CTLA4-893
cauuugagcuggguuucagg

SEQ ID NO: 49044 - RNA, 21 nt, Artificial Sequence
  Synthetic oligonucleotide: CTLA4-3389
acauuugagcuggguuucagg

SEQ ID NO: 49045 - RNA, 22 nt, Artificial Sequence
  Synthetic oligonucleotide: CTLA4-3390
uacauuugagcuggguuucagg

SEQ ID NO: 49046 - RNA, 23 nt, Artificial Sequence
  Synthetic oligonucleotide: CTLA4-3391
auacauuugagcuggguuucagg

SEQ ID NO: 49047 - RNA, 24 nt, Artificial Sequence
  Synthetic oligonucleotide: CTLA4-3392
aauacauuugagcuggguuucagg

SEQ ID NO: 49048 - RNA, 18 nt, Artificial Sequence
  Synthetic oligonucleotide: CTLA4-3393
gccagcuuguuuaaaaug

SEQ ID NO: 49049 - RNA, 19 nt, Artificial Sequence
  Synthetic oligonucleotide: CTLA4-3394
agccagcuuguuuaaaaug

SEQ ID NO: 49050 - RNA, 20 nt, Artificial Sequence
  Synthetic oligonucleotide: CTLA4-1141
uagccagcuuguuuaaaaug

SEQ ID NO: 49051 - RNA, 21 nt, Artificial Sequence
  Synthetic oligonucleotide: CTLA4-3395
uuagccagcuuguuuaaaaug

SEQ ID NO: 49052 - RNA, 22 nt, Artificial Sequence
  Synthetic oligonucleotide: CTLA4-3396
auuagccagcuuguuuaaaaug

SEQ ID NO: 49053 - RNA, 23 nt, Artificial Sequence
  Synthetic oligonucleotide: CTLA4-3397
aauuagccagcuuguuuaaaaug

SEQ ID NO: 49054 - RNA, 24 nt, Artificial Sequence
  Synthetic oligonucleotide: CTLA4-3398
gaauuagccagcuuguuuaaaaug

SEQ ID NO: 49055 - RNA, 18 nt, Artificial Sequence
  Synthetic oligonucleotide: CTLA4-3399
aagaaagaaacauucaug

SEQ ID NO: 49056 - RNA, 19 nt, Artificial Sequence
  Synthetic oligonucleotide: CTLA4-3400
aaagaaagaaacauucaug

SEQ ID NO: 49057 - RNA, 20 nt, Artificial Sequence
  Synthetic oligonucleotide: CTLA4-760
uaaagaaagaaacauucaug

SEQ ID NO: 49058 - RNA, 21 nt, Artificial Sequence
  Synthetic oligonucleotide: CTLA4-3401
auaaagaaagaaacauucaug

SEQ ID NO: 49059 - RNA, 22 nt, Artificial Sequence
  Synthetic oligonucleotide: CTLA4-3402
aauaaagaaagaaacauucaug

SEQ ID NO: 49060 - RNA, 23 nt, Artificial Sequence
  Synthetic oligonucleotide: CTLA4-3403
uaauaaagaaagaaacauucaug

SEQ ID NO: 49061 - RNA, 24 nt, Artificial Sequence
  Synthetic oligonucleotide: CTLA4-3404
uuaauaaagaaagaaacauucaug

SEQ ID NO: 49062 - RNA, 18 nt, Artificial Sequence
  Synthetic oligonucleotide: CTLA4-3405
uaaaauguagggaaauug

SEQ ID NO: 49063 - RNA, 19 nt, Artificial Sequence
  Synthetic oligonucleotide: CTLA4-3406
uuaaaauguagggaaauug

SEQ ID NO: 49064 - RNA, 20 nt, Artificial Sequence
  Synthetic oligonucleotide: CTLA4-708
uuuaaaauguagggaaauug

SEQ ID NO: 49065 - RNA, 21 nt, Artificial Sequence
  Synthetic oligonucleotide: CTLA4-3407
guuuaaaauguagggaaauug

SEQ ID NO: 49066 - RNA, 22 nt, Artificial Sequence
  Synthetic oligonucleotide: CTLA4-3408
uguuuaaaauguagggaaauug

SEQ ID NO: 49067 - RNA, 23 nt, Artificial Sequence
  Synthetic oligonucleotide: CTLA4-3409
uuguuuaaaauguagggaaauug

SEQ ID NO: 49068 - RNA, 24 nt, Artificial Sequence
  Synthetic oligonucleotide: CTLA4-3410
cuuguuuaaaauguagggaaauug

SEQ ID NO: 49069 - RNA, 18 nt, Artificial Sequence
  Synthetic oligonucleotide: CTLA4-3411
agagacaaaacagaguug

SEQ ID NO: 49070 - RNA, 19 nt, Artificial Sequence
  Synthetic oligonucleotide: CTLA4-3412
cagagacaaaacagaguug

SEQ ID NO: 49071 - RNA, 20 nt, Artificial Sequence
  Synthetic oligonucleotide: CTLA4-1234
acagagacaaaacagaguug

SEQ ID NO: 49072 - RNA, 21 nt, Artificial Sequence
  Synthetic oligonucleotide: CTLA4-3413
aacagagacaaaacagaguug

SEQ ID NO: 49073 - RNA, 22 nt, Artificial Sequence
  Synthetic oligonucleotide: CTLA4-3414
caacagagacaaaacagaguug

SEQ ID NO: 49074 - RNA, 23 nt, Artificial Sequence
  Synthetic oligonucleotide: CTLA4-3415
ucaacagagacaaaacagaguug

SEQ ID NO: 49075 - RNA, 24 nt, Artificial Sequence
  Synthetic oligonucleotide: CTLA4-3416
cucaacagagacaaaacagaguug

SEQ ID NO: 49076 - RNA, 18 nt, Artificial Sequence
  Synthetic oligonucleotide: CTLA4-3417
aagcugccucugguuuug

SEQ ID NO: 49077 - RNA, 19 nt, Artificial Sequence
  Synthetic oligonucleotide: CTLA4-3418
gaagcugccucugguuuug

SEQ ID NO: 49078 - RNA, 20 nt, Artificial Sequence
  Synthetic oligonucleotide: CTLA4-1241
agaagcugccucugguuuug

SEQ ID NO: 49079 - RNA, 21 nt, Artificial Sequence
  Synthetic oligonucleotide: CTLA4-3419
aagaagcugccucugguuuug

SEQ ID NO: 49080 - RNA, 22 nt, Artificial Sequence
  Synthetic oligonucleotide: CTLA4-3420
aaagaagcugccucugguuuug

SEQ ID NO: 49081 - RNA, 23 nt, Artificial Sequence
  Synthetic oligonucleotide: CTLA4-3421
aaaagaagcugccucugguuuug

SEQ ID NO: 49082 - RNA, 24 nt, Artificial Sequence
  Synthetic oligonucleotide: CTLA4-3422
gaaaagaagcugccucugguuuug

SEQ ID NO: 49083 - RNA, 18 nt, Artificial Sequence
  Synthetic oligonucleotide: CTLA4-3423
ugaggaccuuccuuaaau

SEQ ID NO: 49084 - RNA, 19 nt, Artificial Sequence
  Synthetic oligonucleotide: CTLA4-3424
uugaggaccuuccuuaaau

SEQ ID NO: 49085 - RNA, 20 nt, Artificial Sequence
  Synthetic oligonucleotide: CTLA4-1221
auugaggaccuuccuuaaau

SEQ ID NO: 49086 - RNA, 21 nt, Artificial Sequence
  Synthetic oligonucleotide: CTLA4-3425
cauugaggaccuuccuuaaau

SEQ ID NO: 49087 - RNA, 22 nt, Artificial Sequence
  Synthetic oligonucleotide: CTLA4-3426
acauugaggaccuuccuuaaau

SEQ ID NO: 49088 - RNA, 23 nt, Artificial Sequence
  Synthetic oligonucleotide: CTLA4-3427
aacauugaggaccuuccuuaaau

SEQ ID NO: 49089 - RNA, 24 nt, Artificial Sequence
  Synthetic oligonucleotide: CTLA4-3428
aaacauugaggaccuuccuuaaau

SEQ ID NO: 49090 - RNA, 18 nt, Artificial Sequence
  Synthetic oligonucleotide: CTLA4-3429
ugaucuaacaaaaagaau

SEQ ID NO: 49091 - RNA, 19 nt, Artificial Sequence
  Synthetic oligonucleotide: CTLA4-3430
augaucuaacaaaaagaau

SEQ ID NO: 49092 - RNA, 20 nt, Artificial Sequence
  Synthetic oligonucleotide: CTLA4-1224
aaugaucuaacaaaaagaau

SEQ ID NO: 49093 - RNA, 21 nt, Artificial Sequence
  Synthetic oligonucleotide: CTLA4-3431
caaugaucuaacaaaaagaau

SEQ ID NO: 49094 - RNA, 22 nt, Artificial Sequence
  Synthetic oligonucleotide: CTLA4-3432
ccaaugaucuaacaaaaagaau

SEQ ID NO: 49095 - RNA, 23 nt, Artificial Sequence
  Synthetic oligonucleotide: CTLA4-3433
accaaugaucuaacaaaaagaau

SEQ ID NO: 49096 - RNA, 24 nt, Artificial Sequence
  Synthetic oligonucleotide: CTLA4-3434
gaccaaugaucuaacaaaaagaau

SEQ ID NO: 49097 - RNA, 18 nt, Artificial Sequence
  Synthetic oligonucleotide: CTLA4-3435
ccauaguccugaauacau

SEQ ID NO: 49098 - RNA, 19 nt, Artificial Sequence
  Synthetic oligonucleotide: CTLA4-3436
gccauaguccugaauacau

SEQ ID NO: 49099 - RNA, 20 nt, Artificial Sequence
  Synthetic oligonucleotide: CTLA4-890
agccauaguccugaauacau

SEQ ID NO: 49100 - RNA, 21 nt, Artificial Sequence
  Synthetic oligonucleotide: CTLA4-3437
uagccauaguccugaauacau

SEQ ID NO: 49101 - RNA, 22 nt, Artificial Sequence
  Synthetic oligonucleotide: CTLA4-3438
auagccauaguccugaauacau

SEQ ID NO: 49102 - RNA, 23 nt, Artificial Sequence
  Synthetic oligonucleotide: CTLA4-3439
gauagccauaguccugaauacau

SEQ ID NO: 49103 - RNA, 24 nt, Artificial Sequence
  Synthetic oligonucleotide: CTLA4-3440
ggauagccauaguccugaauacau

SEQ ID NO: 49104 - RNA, 18 nt, Artificial Sequence
  Synthetic oligonucleotide: CTLA4-3441
aaagaaagaaacauucau

SEQ ID NO: 49105 - RNA, 19 nt, Artificial Sequence
  Synthetic oligonucleotide: CTLA4-3442
uaaagaaagaaacauucau

SEQ ID NO: 49106 - RNA, 20 nt, Artificial Sequence
  Synthetic oligonucleotide: CTLA4-761
auaaagaaagaaacauucau

SEQ ID NO: 49107 - RNA, 21 nt, Artificial Sequence
  Synthetic oligonucleotide: CTLA4-3443
aauaaagaaagaaacauucau

SEQ ID NO: 49108 - RNA, 22 nt, Artificial Sequence
  Synthetic oligonucleotide: CTLA4-3444
uaauaaagaaagaaacauucau

SEQ ID NO: 49109 - RNA, 23 nt, Artificial Sequence
  Synthetic oligonucleotide: CTLA4-3445
uuaauaaagaaagaaacauucau

SEQ ID NO: 49110 - RNA, 24 nt, Artificial Sequence
  Synthetic oligonucleotide: CTLA4-3446
uuuaauaaagaaagaaacauucau

SEQ ID NO: 49111 - RNA, 18 nt, Artificial Sequence
  Synthetic oligonucleotide: CTLA4-3447
ccaaaugauucaagagau

SEQ ID NO: 49112 - RNA, 19 nt, Artificial Sequence
  Synthetic oligonucleotide: CTLA4-3448
cccaaaugauucaagagau

SEQ ID NO: 49113 - RNA, 20 nt, Artificial Sequence
  Synthetic oligonucleotide: CTLA4-1231
acccaaaugauucaagagau

SEQ ID NO: 49114 - RNA, 21 nt, Artificial Sequence
  Synthetic oligonucleotide: CTLA4-3449
aacccaaaugauucaagagau

SEQ ID NO: 49115 - RNA, 22 nt, Artificial Sequence
  Synthetic oligonucleotide: CTLA4-3450
caacccaaaugauucaagagau

SEQ ID NO: 49116 - RNA, 23 nt, Artificial Sequence
  Synthetic oligonucleotide: CTLA4-3451
ccaacccaaaugauucaagagau

SEQ ID NO: 49117 - RNA, 24 nt, Artificial Sequence
  Synthetic oligonucleotide: CTLA4-3452
gccaacccaaaugauucaagagau

SEQ ID NO: 49118 - RNA, 18 nt, Artificial Sequence
  Synthetic oligonucleotide: CTLA4-3453
uugacuuaagcaaauccu

SEQ ID NO: 49119 - RNA, 19 nt, Artificial Sequence
  Synthetic oligonucleotide: CTLA4-3454
auugacuuaagcaaauccu

SEQ ID NO: 49120 - RNA, 20 nt, Artificial Sequence
  Synthetic oligonucleotide: CTLA4-2152
aauugacuuaagcaaauccu

SEQ ID NO: 49121 - RNA, 21 nt, Artificial Sequence
  Synthetic oligonucleotide: CTLA4-3455
aaauugacuuaagcaaauccu

SEQ ID NO: 49122 - RNA, 22 nt, Artificial Sequence
  Synthetic oligonucleotide: CTLA4-3456
aaaauugacuuaagcaaauccu

SEQ ID NO: 49123 - RNA, 23 nt, Artificial Sequence
  Synthetic oligonucleotide: CTLA4-3457
aaaaauugacuuaagcaaauccu

SEQ ID NO: 49124 - RNA, 24 nt, Artificial Sequence
  Synthetic oligonucleotide: CTLA4-3458
aaaaaauugacuuaagcaaauccu

SEQ ID NO: 49125 - RNA, 18 nt, Artificial Sequence
  Synthetic oligonucleotide: CTLA4-3459
gcaauuucagacccuucu

SEQ ID NO: 49126 - RNA, 19 nt, Artificial Sequence
  Synthetic oligonucleotide: CTLA4-3460
ggcaauuucagacccuucu

SEQ ID NO: 49127 - RNA, 20 nt, Artificial Sequence
  Synthetic oligonucleotide: CTLA4-881
aggcaauuucagacccuucu

SEQ ID NO: 49128 - RNA, 21 nt, Artificial Sequence
  Synthetic oligonucleotide: CTLA4-3461
caggcaauuucagacccuucu

SEQ ID NO: 49129 - RNA, 22 nt, Artificial Sequence
  Synthetic oligonucleotide: CTLA4-3462
acaggcaauuucagacccuucu

SEQ ID NO: 49130 - RNA, 23 nt, Artificial Sequence
  Synthetic oligonucleotide: CTLA4-3463
cacaggcaauuucagacccuucu

SEQ ID NO: 49131 - RNA, 24 nt, Artificial Sequence
  Synthetic oligonucleotide: CTLA4-3464
acacaggcaauuucagacccuucu

SEQ ID NO: 49132 - RNA, 18 nt, Artificial Sequence
  Synthetic oligonucleotide: CTLA4-3465
uuauuuaaaaauaaaagu

SEQ ID NO: 49133 - RNA, 19 nt, Artificial Sequence
  Synthetic oligonucleotide: CTLA4-3466
auuauuuaaaaauaaaagu

SEQ ID NO: 49134 - RNA, 20 nt, Artificial Sequence
  Synthetic oligonucleotide: CTLA4-1148
aauuauuuaaaaauaaaagu

SEQ ID NO: 49135 - RNA, 21 nt, Artificial Sequence
  Synthetic oligonucleotide: CTLA4-3467
caauuauuuaaaaauaaaagu

SEQ ID NO: 49136 - RNA, 22 nt, Artificial Sequence
  Synthetic oligonucleotide: CTLA4-3468
ccaauuauuuaaaaauaaaagu

SEQ ID NO: 49137 - RNA, 23 nt, Artificial Sequence
  Synthetic oligonucleotide: CTLA4-3469
gccaauuauuuaaaaauaaaagu

SEQ ID NO: 49138 - RNA, 24 nt, Artificial Sequence
  Synthetic oligonucleotide: CTLA4-3470
agccaauuauuuaaaaauaaaagu

SEQ ID NO: 49139 - RNA, 18 nt, Artificial Sequence
  Synthetic oligonucleotide: CTLA4-3471
ccagcuuguuuaaaaugu

SEQ ID NO: 49140 - RNA, 19 nt, Artificial Sequence
  Synthetic oligonucleotide: CTLA4-3472
gccagcuuguuuaaaaugu

SEQ ID NO: 49141 - RNA, 20 nt, Artificial Sequence
  Synthetic oligonucleotide: CTLA4-706
agccagcuuguuuaaaaugu

SEQ ID NO: 49142 - RNA, 21 nt, Artificial Sequence
  Synthetic oligonucleotide: CTLA4-3473
uagccagcuuguuuaaaaugu

SEQ ID NO: 49143 - RNA, 22 nt, Artificial Sequence
  Synthetic oligonucleotide: CTLA4-3474
uuagccagcuuguuuaaaaugu

SEQ ID NO: 49144 - RNA, 23 nt, Artificial Sequence
  Synthetic oligonucleotide: CTLA4-3475
auuagccagcuuguuuaaaaugu

SEQ ID NO: 49145 - RNA, 24 nt, Artificial Sequence
  Synthetic oligonucleotide: CTLA4-3476
aauuagccagcuuguuuaaaaugu

SEQ ID NO: 49146 - RNA, 18 nt, Artificial Sequence
  Synthetic oligonucleotide: CTLA4-3477
aaaauguagggaaauugu

SEQ ID NO: 49147 - RNA, 19 nt, Artificial Sequence
  Synthetic oligonucleotide: CTLA4-3478
uaaaauguagggaaauugu

SEQ ID NO: 49148 - RNA, 20 nt, Artificial Sequence
  Synthetic oligonucleotide: CTLA4-709
uuaaaauguagggaaauugu

SEQ ID NO: 49149 - RNA, 21 nt, Artificial Sequence
  Synthetic oligonucleotide: CTLA4-3479
uuuaaaauguagggaaauugu

SEQ ID NO: 49150 - RNA, 22 nt, Artificial Sequence
  Synthetic oligonucleotide: CTLA4-3480
guuuaaaauguagggaaauugu

SEQ ID NO: 49151 - RNA, 23 nt, Artificial Sequence
  Synthetic oligonucleotide: CTLA4-3481
uguuuaaaauguagggaaauugu

SEQ ID NO: 49152 - RNA, 24 nt, Artificial Sequence
  Synthetic oligonucleotide: CTLA4-3482
uuguuuaaaauguagggaaauugu

SEQ ID NO: 49153 - RNA, 18 nt, Artificial Sequence
  Synthetic oligonucleotide: CTLA4-3483
uuaaaauguagggaaauu

SEQ ID NO: 49154 - RNA, 19 nt, Artificial Sequence
  Synthetic oligonucleotide: CTLA4-3484
uuuaaaauguagggaaauu

SEQ ID NO: 49155 - RNA, 20 nt, Artificial Sequence
  Synthetic oligonucleotide: CTLA4-1144
guuuaaaauguagggaaauu

SEQ ID NO: 49156 - RNA, 21 nt, Artificial Sequence
  Synthetic oligonucleotide: CTLA4-3485
uguuuaaaauguagggaaauu

SEQ ID NO: 49157 - RNA, 22 nt, Artificial Sequence
  Synthetic oligonucleotide: CTLA4-3486
uuguuuaaaauguagggaaauu

SEQ ID NO: 49158 - RNA, 23 nt, Artificial Sequence
  Synthetic oligonucleotide: CTLA4-3487
cuuguuuaaaauguagggaaauu

SEQ ID NO: 49159 - RNA, 24 nt, Artificial Sequence
  Synthetic oligonucleotide: CTLA4-3488
gcuuguuuaaaauguagggaaauu

SEQ ID NO: 49160 - RNA, 18 nt, Artificial Sequence
  Synthetic oligonucleotide: CTLA4-3489
aaaagaauuugaaacauu

SEQ ID NO: 49161 - RNA, 19 nt, Artificial Sequence
  Synthetic oligonucleotide: CTLA4-3490
aaaaagaauuugaaacauu

SEQ ID NO: 49162 - RNA, 20 nt, Artificial Sequence
  Synthetic oligonucleotide: CTLA4-1222
caaaaagaauuugaaacauu

SEQ ID NO: 49163 - RNA, 21 nt, Artificial Sequence
  Synthetic oligonucleotide: CTLA4-3491
acaaaaagaauuugaaacauu

SEQ ID NO: 49164 - RNA, 22 nt, Artificial Sequence
  Synthetic oligonucleotide: CTLA4-3492
aacaaaaagaauuugaaacauu

SEQ ID NO: 49165 - RNA, 23 nt, Artificial Sequence
  Synthetic oligonucleotide: CTLA4-3493
uaacaaaaagaauuugaaacauu

SEQ ID NO: 49166 - RNA, 24 nt, Artificial Sequence
  Synthetic oligonucleotide: CTLA4-3494
cuaacaaaaagaauuugaaacauu

SEQ ID NO: 49167 - RNA, 18 nt, Artificial Sequence
  Synthetic oligonucleotide: CTLA4-3495
aaacauaguugauaccuu

SEQ ID NO: 49168 - RNA, 19 nt, Artificial Sequence
  Synthetic oligonucleotide: CTLA4-3496
aaaacauaguugauaccuu

SEQ ID NO: 49169 - RNA, 20 nt, Artificial Sequence
  Synthetic oligonucleotide: CTLA4-3497
aaaaacauaguugauaccuu

SEQ ID NO: 49170 - RNA, 21 nt, Artificial Sequence
  Synthetic oligonucleotide: CTLA4-3498
caaaaacauaguugauaccuu

SEQ ID NO: 49171 - RNA, 22 nt, Artificial Sequence
  Synthetic oligonucleotide: CTLA4-3499
acaaaaacauaguugauaccuu

SEQ ID NO: 49172 - RNA, 23 nt, Artificial Sequence
  Synthetic oligonucleotide: CTLA4-3500
aacaaaaacauaguugauaccuu

SEQ ID NO: 49173 - RNA, 24 nt, Artificial Sequence
  Synthetic oligonucleotide: CTLA4-3501
aaacaaaaacauaguugauaccuu

SEQ ID NO: 49174 - RNA, 18 nt, Artificial Sequence
  Synthetic oligonucleotide: CTLA4-3502
ccucaguuuucagcucuu

SEQ ID NO: 49175 - RNA, 19 nt, Artificial Sequence
  Synthetic oligonucleotide: CTLA4-3503
uccucaguuuucagcucuu

SEQ ID NO: 49176 - RNA, 20 nt, Artificial Sequence
  Synthetic oligonucleotide: CTLA4-1156
auccucaguuuucagcucuu

SEQ ID NO: 49177 - RNA, 21 nt, Artificial Sequence
  Synthetic oligonucleotide: CTLA4-3504
gauccucaguuuucagcucuu

SEQ ID NO: 49178 - RNA, 22 nt, Artificial Sequence
  Synthetic oligonucleotide: CTLA4-3505
agauccucaguuuucagcucuu

SEQ ID NO: 49179 - RNA, 23 nt, Artificial Sequence
  Synthetic oligonucleotide: CTLA4-3506
cagauccucaguuuucagcucuu

SEQ ID NO: 49180 - RNA, 24 nt, Artificial Sequence
  Synthetic oligonucleotide: CTLA4-3507
gcagauccucaguuuucagcucuu

SEQ ID NO: 49181 - RNA, 18 nt, Artificial Sequence
  Synthetic oligonucleotide: CTLA4-3508
ugagacuggaagugauuu

SEQ ID NO: 49182 - RNA, 19 nt, Artificial Sequence
  Synthetic oligonucleotide: CTLA4-3509
augagacuggaagugauuu

SEQ ID NO: 49183 - RNA, 20 nt, Artificial Sequence
  Synthetic oligonucleotide: CTLA4-884
uaugagacuggaagugauuu

SEQ ID NO: 49184 - RNA, 21 nt, Artificial Sequence
  Synthetic oligonucleotide: CTLA4-3510
cuaugagacuggaagugauuu

SEQ ID NO: 49185 - RNA, 22 nt, Artificial Sequence
  Synthetic oligonucleotide: CTLA4-3511
ucuaugagacuggaagugauuu

SEQ ID NO: 49186 - RNA, 23 nt, Artificial Sequence
  Synthetic oligonucleotide: CTLA4-3512
uucuaugagacuggaagugauuu

SEQ ID NO: 49187 - RNA, 24 nt, Artificial Sequence
  Synthetic oligonucleotide: CTLA4-3513
cuucuaugagacuggaagugauuu

SEQ ID NO: 49188 - RNA, 17 nt, Artificial Sequence
  Synthetic oligonucleotide: CTLA4-3514
ucguaaaaccaaaacaa

SEQ ID NO: 49189 - RNA, 17 nt, Artificial Sequence
  Synthetic oligonucleotide: CTLA4-1348
aauacagagccagccaa

SEQ ID NO: 49190 - RNA, 17 nt, Artificial Sequence
  Synthetic oligonucleotide: CTLA4-3515
uaaagguaaaacuccaa

SEQ ID NO: 49191 - RNA, 17 nt, Artificial Sequence
  Synthetic oligonucleotide: CTLA4-3516
gauccucaaagugaaca

SEQ ID NO: 49192 - RNA, 17 nt, Artificial Sequence
  Synthetic oligonucleotide: CTLA4-740
agggaccauuagaagga

SEQ ID NO: 49193 - RNA, 17 nt, Artificial Sequence
  Synthetic oligonucleotide: CTLA4-3517
aucaaggacuuuauaua

SEQ ID NO: 49194 - RNA, 17 nt, Artificial Sequence
  Synthetic oligonucleotide: CTLA4-1354
cucuuaaccaaaugcua

SEQ ID NO: 49195 - RNA, 17 nt, Artificial Sequence
  Synthetic oligonucleotide: CTLA4-3518
gacguaacagcuaaacc

SEQ ID NO: 49196 - RNA, 17 nt, Artificial Sequence
  Synthetic oligonucleotide: CTLA4-1338
gaugguuaaggaugccc

SEQ ID NO: 49197 - RNA, 17 nt, Artificial Sequence
  Synthetic oligonucleotide: CTLA4-3519
aaaaccuuucaggaucc

SEQ ID NO: 49198 - RNA, 17 nt, Artificial Sequence
  Synthetic oligonucleotide: CTLA4-2107
caccgcucccauaaagc

SEQ ID NO: 49199 - RNA, 17 nt, Artificial Sequence
  Synthetic oligonucleotide: CTLA4-2108
ugaaauccaaggcaagc

SEQ ID NO: 49200 - RNA, 17 nt, Artificial Sequence
  Synthetic oligonucleotide: CTLA4-452
auaaagccauggcuugc

SEQ ID NO: 49201 - RNA, 17 nt, Artificial Sequence
  Synthetic oligonucleotide: CTLA4-1340
ugaauacauuuuccauc

SEQ ID NO: 49202 - RNA, 17 nt, Artificial Sequence
  Synthetic oligonucleotide: CTLA4-1343
guuucagcagucaaagg

SEQ ID NO: 49203 - RNA, 17 nt, Artificial Sequence
  Synthetic oligonucleotide: CTLA4-3520
acauuuuccauccaugg

SEQ ID NO: 49204 - RNA, 17 nt, Artificial Sequence
  Synthetic oligonucleotide: CTLA4-1347
gagcccuugggcuaaug

SEQ ID NO: 49205 - RNA, 17 nt, Artificial Sequence
  Synthetic oligonucleotide: CTLA4-3521
gaguuuuaccuuuaacu

SEQ ID NO: 49206 - RNA, 17 nt, Artificial Sequence
  Synthetic oligonucleotide: CTLA4-1341
agcuaucuauauaaagu

SEQ ID NO: 49207 - RNA, 17 nt, Artificial Sequence
  Synthetic oligonucleotide: CTLA4-623
agcgccagguauuuagu

SEQ ID NO: 49208 - RNA, 17 nt, Artificial Sequence
  Synthetic oligonucleotide: CTLA4-3522
ccuucuaauggucccuu

SEQ ID NO: 49209 - RNA, 17 nt, Artificial Sequence
  Synthetic oligonucleotide: CTLA4-3523
uggguucaaacacauuu

SEQ ID NO: 49210 - RNA, 20 nt, Artificial Sequence
  Synthetic oligonucleotide: CTLA4-833
gcccagaagauugaauaaaa

SEQ ID NO: 49211 - RNA, 20 nt, Artificial Sequence
  Synthetic oligonucleotide: CTLA4-3524
uucucguaaaaccaaaacaa

SEQ ID NO: 49212 - RNA, 20 nt, Artificial Sequence
  Synthetic oligonucleotide: CTLA4-1346
uggaauacagagccagccaa

SEQ ID NO: 49213 - RNA, 20 nt, Artificial Sequence
  Synthetic oligonucleotide: CTLA4-3525
aguuaaagguaaaacuccaa

SEQ ID NO: 49214 - RNA, 20 nt, Artificial Sequence
  Synthetic oligonucleotide: CTLA4-3526
ccagauccucaaagugaaca

SEQ ID NO: 49215 - RNA, 20 nt, Artificial Sequence
  Synthetic oligonucleotide: CTLA4-702
ucaagggaccauuagaagga

SEQ ID NO: 49216 - RNA, 20 nt, Artificial Sequence
  Synthetic oligonucleotide: CTLA4-3527
agaaucaaggacuuuauaua

SEQ ID NO: 49217 - RNA, 20 nt, Artificial Sequence
  Synthetic oligonucleotide: CTLA4-1351
uuucucuuaaccaaaugcua

SEQ ID NO: 49218 - RNA, 20 nt, Artificial Sequence
  Synthetic oligonucleotide: CTLA4-3528
aaauguauucaauuugaaac

SEQ ID NO: 49219 - RNA, 20 nt, Artificial Sequence
  Synthetic oligonucleotide: CTLA4-3529
uucgacguaacagcuaaacc

SEQ ID NO: 49220 - RNA, 20 nt, Artificial Sequence
  Synthetic oligonucleotide: CTLA4-1331
cuggaugguuaaggaugccc

SEQ ID NO: 49221 - RNA, 20 nt, Artificial Sequence
  Synthetic oligonucleotide: CTLA4-3530
agcaaaaccuuucaggaucc

SEQ ID NO: 49222 - RNA, 20 nt, Artificial Sequence
  Synthetic oligonucleotide: CTLA4-2112
gaacaccgcucccauaaagc

SEQ ID NO: 49223 - RNA, 20 nt, Artificial Sequence
  Synthetic oligonucleotide: CTLA4-2113
cgcugaaauccaaggcaagc

SEQ ID NO: 49224 - RNA, 20 nt, Artificial Sequence
  Synthetic oligonucleotide: CTLA4-1370
cccauaaagccauggcuugc

SEQ ID NO: 49225 - RNA, 20 nt, Artificial Sequence
  Synthetic oligonucleotide: CTLA4-1333
aauugaauacauuuuccauc

SEQ ID NO: 49226 - RNA, 20 nt, Artificial Sequence
  Synthetic oligonucleotide: CTLA4-3531
aauacauuuuccauccaugg

SEQ ID NO: 49227 - RNA, 20 nt, Artificial Sequence
  Synthetic oligonucleotide: CTLA4-1345
ucugagcccuugggcuaaug

SEQ ID NO: 49228 - RNA, 20 nt, Artificial Sequence
  Synthetic oligonucleotide: CTLA4-3532
uuggaguuuuaccuuuaacu

SEQ ID NO: 49229 - RNA, 20 nt, Artificial Sequence
  Synthetic oligonucleotide: CTLA4-1334
caaagcuaucuauauaaagu

SEQ ID NO: 49230 - RNA, 20 nt, Artificial Sequence
  Synthetic oligonucleotide: CTLA4-511
cagagcgccagguauuuagu

SEQ ID NO: 49231 - RNA, 20 nt, Artificial Sequence
  Synthetic oligonucleotide: CTLA4-3533
cauccuucuaauggucccuu

SEQ ID NO: 49232 - RNA, 20 nt, Artificial Sequence
  Synthetic oligonucleotide: CTLA4-3534
guguggguucaaacacauuu

SEQ ID NO: 49233 - RNA, 17 nt, Artificial Sequence
  Synthetic oligonucleotide: CTLA4-905
cagaagauugaauaaaa

SEQ ID NO: 49234 - RNA, 17 nt, Artificial Sequence
  Synthetic oligonucleotide: CTLA4-3535
uguauucaauuugaaac

SEQ ID NO: 49235 - RNA, 17 nt, Artificial Sequence
  Synthetic oligonucleotide: CTLA4-1353
uauuuucaguuuauuuc

SEQ ID NO: 49236 - RNA, 17 nt, Artificial Sequence
  Synthetic oligonucleotide: CTLA4-3536
gcuuguuuuguucaguu

SEQ ID NO: 49237 - RNA, 20 nt, Artificial Sequence
  Synthetic oligonucleotide: CTLA4-1350
gccuauuuucaguuuauuuc

SEQ ID NO: 49238 - RNA, 20 nt, Artificial Sequence
  Synthetic oligonucleotide: CTLA4-1336
uuuguuucagcagucaaagg

SEQ ID NO: 49239 - RNA, 20 nt, Artificial Sequence
  Synthetic oligonucleotide: CTLA4-3537
uuggcuuguuuuguucaguu

SEQ ID NO: 49240 - RNA, 17 nt, Artificial Sequence
  Synthetic oligonucleotide: CTLA4-3538
ccuucugcaaaaccaga

SEQ ID NO: 49241 - RNA, 17 nt, Artificial Sequence
  Synthetic oligonucleotide: CTLA4-3539
acuuuauaaaugaauua

SEQ ID NO: 49242 - RNA, 17 nt, Artificial Sequence
  Synthetic oligonucleotide: CTLA4-2126
acauaguugauaccuua

SEQ ID NO: 49243 - RNA, 17 nt, Artificial Sequence
  Synthetic oligonucleotide: CTLA4-3540
cccggaauucugugcac

SEQ ID NO: 49244 - RNA, 17 nt, Artificial Sequence
  Synthetic oligonucleotide: CTLA4-1364
caaagaaaagccaaccc

SEQ ID NO: 49245 - RNA, 17 nt, Artificial Sequence
  Synthetic oligonucleotide: CTLA4-1352
aaaauguaugaaaacuc

SEQ ID NO: 49246 - RNA, 17 nt, Artificial Sequence
  Synthetic oligonucleotide: CTLA4-1357
uucaagguuuuaagguc

SEQ ID NO: 49247 - RNA, 17 nt, Artificial Sequence
  Synthetic oligonucleotide: CTLA4-1290
gccaacccaaaugauuc

SEQ ID NO: 49248 - RNA, 17 nt, Artificial Sequence
  Synthetic oligonucleotide: CTLA4-1368
uagcaaaaaaacucuuc

SEQ ID NO: 49249 - RNA, 17 nt, Artificial Sequence
  Synthetic oligonucleotide: CTLA4-1362
agcagaaaauucaaaag

SEQ ID NO: 49250 - RNA, 17 nt, Artificial Sequence
  Synthetic oligonucleotide: CTLA4-1369
ggcuaauuagcuaguag

SEQ ID NO: 49251 - RNA, 17 nt, Artificial Sequence
  Synthetic oligonucleotide: CTLA4-3541
aaaaaacucuucccagg

SEQ ID NO: 49252 - RNA, 17 nt, Artificial Sequence
  Synthetic oligonucleotide: CTLA4-1344
cccuucuaugagacugg

SEQ ID NO: 49253 - RNA, 17 nt, Artificial Sequence
  Synthetic oligonucleotide: CTLA4-3542
ucucuugaaucauuugg

SEQ ID NO: 49254 - RNA, 17 nt, Artificial Sequence
  Synthetic oligonucleotide: CTLA4-3543
uguaugccaaacagacu

SEQ ID NO: 49255 - RNA, 17 nt, Artificial Sequence
  Synthetic oligonucleotide: CTLA4-3544
uuuugucucuguugagu

SEQ ID NO: 49256 - RNA, 17 nt, Artificial Sequence
  Synthetic oligonucleotide: CTLA4-3545
aucuucacuuuugaauu

SEQ ID NO: 49257 - RNA, 20 nt, Artificial Sequence
  Synthetic oligonucleotide: CTLA4-3546
uuuccuucugcaaaaccaga

SEQ ID NO: 49258 - RNA, 20 nt, Artificial Sequence
  Synthetic oligonucleotide: CTLA4-3547
uauacuuuauaaaugaauua

SEQ ID NO: 49259 - RNA, 20 nt, Artificial Sequence
  Synthetic oligonucleotide: CTLA4-2143
aaaacauaguugauaccuua

SEQ ID NO: 49260 - RNA, 20 nt, Artificial Sequence
  Synthetic oligonucleotide: CTLA4-3548
augcccggaauucugugcac

SEQ ID NO: 49261 - RNA, 20 nt, Artificial Sequence
  Synthetic oligonucleotide: CTLA4-1361
guccaaagaaaagccaaccc

SEQ ID NO: 49262 - RNA, 20 nt, Artificial Sequence
  Synthetic oligonucleotide: CTLA4-1349
auuaaaauguaugaaaacuc

SEQ ID NO: 49263 - RNA, 20 nt, Artificial Sequence
  Synthetic oligonucleotide: CTLA4-1355
caauucaagguuuuaagguc

SEQ ID NO: 49264 - RNA, 20 nt, Artificial Sequence
  Synthetic oligonucleotide: CTLA4-1232
aaagccaacccaaaugauuc

SEQ ID NO: 49265 - RNA, 20 nt, Artificial Sequence
  Synthetic oligonucleotide: CTLA4-1365
guauagcaaaaaaacucuuc

SEQ ID NO: 49266 - RNA, 20 nt, Artificial Sequence
  Synthetic oligonucleotide: CTLA4-1359
ucaagcagaaaauucaaaag

SEQ ID NO: 49267 - RNA, 20 nt, Artificial Sequence
  Synthetic oligonucleotide: CTLA4-1366
auuggcuaauuagcuaguag

SEQ ID NO: 49268 - RNA, 20 nt, Artificial Sequence
  Synthetic oligonucleotide: CTLA4-3549
gcaaaaaaacucuucccagg

SEQ ID NO: 49269 - RNA, 20 nt, Artificial Sequence
  Synthetic oligonucleotide: CTLA4-1337
agacccuucuaugagacugg

SEQ ID NO: 49270 - RNA, 20 nt, Artificial Sequence
  Synthetic oligonucleotide: CTLA4-3550
uaaucucuugaaucauuugg

SEQ ID NO: 49271 - RNA, 20 nt, Artificial Sequence
  Synthetic oligonucleotide: CTLA4-3551
uauuguaugccaaacagacu

SEQ ID NO: 49272 - RNA, 20 nt, Artificial Sequence
  Synthetic oligonucleotide: CTLA4-3552
cuguuuugucucuguugagu

SEQ ID NO: 49273 - RNA, 20 nt, Artificial Sequence
  Synthetic oligonucleotide: CTLA4-3553
uuaaucuucacuuuugaauu

SEQ ID NO: 49274 - RNA, 17 nt, Artificial Sequence
  Synthetic oligonucleotide: TRAC-1
gaccagcuugacaucac

SEQ ID NO: 49275 - RNA, 17 nt, Artificial Sequence
  Synthetic oligonucleotide: TRAC-2
ugguacacggcaggguc

SEQ ID NO: 49276 - RNA, 17 nt, Artificial Sequence
  Synthetic oligonucleotide: TRAC-3
uaaacccggccacuuuc

SEQ ID NO: 49277 - RNA, 20 nt, Artificial Sequence
  Synthetic oligonucleotide: TRAC-4
gcugguacacggcaggguca

SEQ ID NO: 49278 - RNA, 20 nt, Artificial Sequence
  Synthetic oligonucleotide: TRAC-5
gucgagaaaagcuuugaaac

SEQ ID NO: 49279 - RNA, 20 nt, Artificial Sequence
  Synthetic oligonucleotide: TRAC-6
cucgaccagcuugacaucac

SEQ ID NO: 49280 - RNA, 20 nt, Artificial Sequence
  Synthetic oligonucleotide: TRAC-7
uucggaacccaaucacugac

SEQ ID NO: 49281 - RNA, 20 nt, Artificial Sequence
  Synthetic oligonucleotide: TRAC-8
cgucaugagcagauuaaacc

SEQ ID NO: 49282 - RNA, 20 nt, Artificial Sequence
  Synthetic oligonucleotide: TRAC-9
gcaccaaagcugcccuuacc

SEQ ID NO: 49283 - RNA, 20 nt, Artificial Sequence
  Synthetic oligonucleotide: TRAC-10
ucucucagcugguacacggc

SEQ ID NO: 49284 - RNA, 20 nt, Artificial Sequence
  Synthetic oligonucleotide: TRAC-11
aucugugggacaagaggauc

SEQ ID NO: 49285 - RNA, 20 nt, Artificial Sequence
  Synthetic oligonucleotide: TRAC-12
gauuaaacccggccacuuuc

SEQ ID NO: 49286 - RNA, 20 nt, Artificial Sequence
  Synthetic oligonucleotide: TRAC-13
guaaaaccaagaggccacag

SEQ ID NO: 49287 - RNA, 20 nt, Artificial Sequence
  Synthetic oligonucleotide: TRAC-14
uaaacccggccacuuucagg

SEQ ID NO: 49288 - RNA, 20 nt, Artificial Sequence
  Synthetic oligonucleotide: TRAC-15
acccggccacuuucaggagg

SEQ ID NO: 49289 - RNA, 20 nt, Artificial Sequence
  Synthetic oligonucleotide: TRAC-16
gagaaucaaaaucggugaau

SEQ ID NO: 49290 - RNA, 20 nt, Artificial Sequence
  Synthetic oligonucleotide: TRAC-17
guaagacaggggucuagccu

SEQ ID NO: 49291 - RNA, 20 nt, Artificial Sequence
  Synthetic oligonucleotide: TRAC-18
ucaggguucuggauaucugu

SEQ ID NO: 49292 - RNA, 17 nt, Artificial Sequence
  Synthetic oligonucleotide: TRAC-19
cacaggaacuuucuaaa

SEQ ID NO: 49293 - RNA, 17 nt, Artificial Sequence
  Synthetic oligonucleotide: TRAC-20
uuccccagcccagguaa

SEQ ID NO: 49294 - RNA, 17 nt, Artificial Sequence
  Synthetic oligonucleotide: TRAC-21
uugaaacagguaagaca

SEQ ID NO: 49295 - RNA, 17 nt, Artificial Sequence
  Synthetic oligonucleotide: TRAC-22
gucucucagcugguaca

SEQ ID NO: 49296 - RNA, 17 nt, Artificial Sequence
  Synthetic oligonucleotide: TRAC-23
ucagcugguacacggca

SEQ ID NO: 49297 - RNA, 17 nt, Artificial Sequence
  Synthetic oligonucleotide: TRAC-24
gugggacaagaggauca

SEQ ID NO: 49298 - RNA, 17 nt, Artificial Sequence
  Synthetic oligonucleotide: TRAC-25
gguacacggcaggguca

SEQ ID NO: 49299 - RNA, 17 nt, Artificial Sequence
  Synthetic oligonucleotide: TRAC-26
ccccacucccagcuuca

SEQ ID NO: 49300 - RNA, 17 nt, Artificial Sequence
  Synthetic oligonucleotide: TRAC-27
accugggcuggggaaga

SEQ ID NO: 49301 - RNA, 17 nt, Artificial Sequence
  Synthetic oligonucleotide: TRAC-28
ugguccagcugagguga

SEQ ID NO: 49302 - RNA, 17 nt, Artificial Sequence
  Synthetic oligonucleotide: TRAC-29
aauaaugcuguuguuga

SEQ ID NO: 49303 - RNA, 17 nt, Artificial Sequence
  Synthetic oligonucleotide: TRAC-30
gcuagacaugaggucua

SEQ ID NO: 49304 - RNA, 17 nt, Artificial Sequence
  Synthetic oligonucleotide: TRAC-31
aaaugugucacaaagua

SEQ ID NO: 49305 - RNA, 17 nt, Artificial Sequence
  Synthetic oligonucleotide: TRAC-32
cuuccccagcccaggua

SEQ ID NO: 49306 - RNA, 17 nt, Artificial Sequence
  Synthetic oligonucleotide: TRAC-33
gagaaaagcuuugaaac

SEQ ID NO: 49307 - RNA, 17 nt, Artificial Sequence
  Synthetic oligonucleotide: TRAC-34
gcagacagacuugucac

SEQ ID NO: 49308 - RNA, 17 nt, Artificial Sequence
  Synthetic oligonucleotide: TRAC-35
uuugaaacagguaagac

SEQ ID NO: 49309 - RNA, 17 nt, Artificial Sequence
  Synthetic oligonucleotide: TRAC-36
ggaacccaaucacugac

SEQ ID NO: 49310 - RNA, 17 nt, Artificial Sequence
  Synthetic oligonucleotide: TRAC-37
caugagcagauuaaacc

SEQ ID NO: 49311 - RNA, 17 nt, Artificial Sequence
  Synthetic oligonucleotide: TRAC-38
ccaaagcugcccuuacc

SEQ ID NO: 49312 - RNA, 17 nt, Artificial Sequence
  Synthetic oligonucleotide: TRAC-39
accuucuuccccagccc

SEQ ID NO: 49313 - RNA, 17 nt, Artificial Sequence
  Synthetic oligonucleotide: TRAC-40
aagacaggggucuagcc

SEQ ID NO: 49314 - RNA, 17 nt, Artificial Sequence
  Synthetic oligonucleotide: TRAC-41
uccuccugaaaguggcc

SEQ ID NO: 49315 - RNA, 17 nt, Artificial Sequence
  Synthetic oligonucleotide: TRAC-42
gcaacagugcuguggcc

SEQ ID NO: 49316 - RNA, 17 nt, Artificial Sequence
  Synthetic oligonucleotide: TRAC-43
gucagauuuguugcucc

SEQ ID NO: 49317 - RNA, 17 nt, Artificial Sequence
  Synthetic oligonucleotide: TRAC-44
uuccugugaugucaagc

SEQ ID NO: 49318 - RNA, 17 nt, Artificial Sequence
  Synthetic oligonucleotide: TRAC-45
gugaggggccuugaagc

SEQ ID NO: 49319 - RNA, 17 nt, Artificial Sequence
  Synthetic oligonucleotide: TRAC-46
aggccccucaccucagc

SEQ ID NO: 49320 - RNA, 17 nt, Artificial Sequence
  Synthetic oligonucleotide: TRAC-47
auuuagagucucucagc

SEQ ID NO: 49321 - RNA, 17 nt, Artificial Sequence
  Synthetic oligonucleotide: TRAC-48
agcuuuggugccuucgc

SEQ ID NO: 49322 - RNA, 17 nt, Artificial Sequence
  Synthetic oligonucleotide: TRAC-49
cucagcugguacacggc

SEQ ID NO: 49323 - RNA, 17 nt, Artificial Sequence
  Synthetic oligonucleotide: TRAC-50
gcugcccuuaccugggc

SEQ ID NO: 49324 - RNA, 17 nt, Artificial Sequence
  Synthetic oligonucleotide: TRAC-51
cuccuccugaaaguggc

SEQ ID NO: 49325 - RNA, 17 nt, Artificial Sequence
  Synthetic oligonucleotide: TRAC-52
ugugggacaagaggauc

SEQ ID NO: 49326 - RNA, 17 nt, Artificial Sequence
  Synthetic oligonucleotide: TRAC-53
gggaagaaggugucuuc

SEQ ID NO: 49327 - RNA, 17 nt, Artificial Sequence
  Synthetic oligonucleotide: TRAC-54
cggcagggucaggguuc

SEQ ID NO: 49328 - RNA, 17 nt, Artificial Sequence
  Synthetic oligonucleotide: TRAC-55
aauccuccuccugaaag

SEQ ID NO: 49329 - RNA, 17 nt, Artificial Sequence
  Synthetic oligonucleotide: TRAC-56
gauaucugugggacaag

SEQ ID NO: 49330 - RNA, 17 nt, Artificial Sequence
  Synthetic oligonucleotide: TRAC-57
guaucuguaaaaccaag

SEQ ID NO: 49331 - RNA, 17 nt, Artificial Sequence
  Synthetic oligonucleotide: TRAC-58
aaaccaagaggccacag

SEQ ID NO: 49332 - RNA, 17 nt, Artificial Sequence
  Synthetic oligonucleotide: TRAC-59
ugaaacagguaagacag

SEQ ID NO: 49333 - RNA, 17 nt, Artificial Sequence
  Synthetic oligonucleotide: TRAC-60
ggccuugaagcugggag

SEQ ID NO: 49334 - RNA, 17 nt, Artificial Sequence
  Synthetic oligonucleotide: TRAC-61
gguccagcugaggugag

SEQ ID NO: 49335 - RNA, 17 nt, Artificial Sequence
  Synthetic oligonucleotide: TRAC-62
acccggccacuuucagg

SEQ ID NO: 49336 - RNA, 17 nt, Artificial Sequence
  Synthetic oligonucleotide: TRAC-63
cggccacuuucaggagg

SEQ ID NO: 49337 - RNA, 17 nt, Artificial Sequence
  Synthetic oligonucleotide: TRAC-64
aaacugugcuagacaug

SEQ ID NO: 49338 - RNA, 17 nt, Artificial Sequence
  Synthetic oligonucleotide: TRAC-65
cggcugugguccagcug

SEQ ID NO: 49339 - RNA, 17 nt, Artificial Sequence
  Synthetic oligonucleotide: TRAC-66
aucugcucaugacgcug

SEQ ID NO: 49340 - RNA, 17 nt, Artificial Sequence
  Synthetic oligonucleotide: TRAC-67
ucaugacgcugcggcug

SEQ ID NO: 49341 - RNA, 17 nt, Artificial Sequence
  Synthetic oligonucleotide: TRAC-68
ugcccuuaccugggcug

SEQ ID NO: 49342 - RNA, 17 nt, Artificial Sequence
  Synthetic oligonucleotide: TRAC-69
caagagcaacagugcug

SEQ ID NO: 49343 - RNA, 17 nt, Artificial Sequence
  Synthetic oligonucleotide: TRAC-70
aggguucuggauaucug

SEQ ID NO: 49344 - RNA, 17 nt, Artificial Sequence
  Synthetic oligonucleotide: TRAC-71
ccuugaagcugggagug

SEQ ID NO: 49345 - RNA, 17 nt, Artificial Sequence
  Synthetic oligonucleotide: TRAC-72
gugguccagcugaggug

SEQ ID NO: 49346 - RNA, 17 nt, Artificial Sequence
  Synthetic oligonucleotide: TRAC-73
uguuugagaaucaaaau

SEQ ID NO: 49347 - RNA, 17 nt, Artificial Sequence
  Synthetic oligonucleotide: TRAC-74
aaucaaaaucggugaau

SEQ ID NO: 49348 - RNA, 17 nt, Artificial Sequence
  Synthetic oligonucleotide: TRAC-75
caaaaccugucagugau

SEQ ID NO: 49349 - RNA, 17 nt, Artificial Sequence
  Synthetic oligonucleotide: TRAC-76
caaagcugcccuuaccu

SEQ ID NO: 49350 - RNA, 17 nt, Artificial Sequence
  Synthetic oligonucleotide: TRAC-77
agacaggggucuagccu

SEQ ID NO: 49351 - RNA, 17 nt, Artificial Sequence
  Synthetic oligonucleotide: TRAC-78
ugaggggccuugaagcu

SEQ ID NO: 49352 - RNA, 17 nt, Artificial Sequence
  Synthetic oligonucleotide: TRAC-79
cugcccuuaccugggcu

SEQ ID NO: 49353 - RNA, 17 nt, Artificial Sequence
  Synthetic oligonucleotide: TRAC-80
uaaccgcuguggccucu

SEQ ID NO: 49354 - RNA, 17 nt, Artificial Sequence
  Synthetic oligonucleotide: TRAC-81
gccuugaagcugggagu

SEQ ID NO: 49355 - RNA, 17 nt, Artificial Sequence
  Synthetic oligonucleotide: TRAC-82
ggguucuggauaucugu

SEQ ID NO: 49356 - RNA, 17 nt, Artificial Sequence
  Synthetic oligonucleotide: TRAC-83
cuuucaggaggaggauu

SEQ ID NO: 49357 - RNA, 17 nt, Artificial Sequence
  Synthetic oligonucleotide: TRAC-84
aaaaccugucagugauu

SEQ ID NO: 49358 - RNA, 17 nt, Artificial Sequence
  Synthetic oligonucleotide: TRAC-85
ccagguaagggcagcuu

SEQ ID NO: 49359 - RNA, 17 nt, Artificial Sequence
  Synthetic oligonucleotide: TRAC-86
acaagaggaucaggguu

SEQ ID NO: 49360 - RNA, 17 nt, Artificial Sequence
  Synthetic oligonucleotide: TRAC-87
acagguuuugaaaguuu

SEQ ID NO: 49361 - RNA, 20 nt, Artificial Sequence
  Synthetic oligonucleotide: TRAC-88
caucacaggaacuuucuaaa

SEQ ID NO: 49362 - RNA, 20 nt, Artificial Sequence
  Synthetic oligonucleotide: TRAC-89
uucuuccccagcccagguaa

SEQ ID NO: 49363 - RNA, 20 nt, Artificial Sequence
  Synthetic oligonucleotide: TRAC-90
gcuuugaaacagguaagaca

SEQ ID NO: 49364 - RNA, 20 nt, Artificial Sequence
  Synthetic oligonucleotide: TRAC-91
agagucucucagcugguaca

SEQ ID NO: 49365 - RNA, 20 nt, Artificial Sequence
  Synthetic oligonucleotide: TRAC-92
cucucagcugguacacggca

SEQ ID NO: 49366 - RNA, 20 nt, Artificial Sequence
  Synthetic oligonucleotide: TRAC-93
ucugugggacaagaggauca

SEQ ID NO: 49367 - RNA, 20 nt, Artificial Sequence
  Synthetic oligonucleotide: TRAC-94
cuuaccugggcuggggaaga

SEQ ID NO: 49368 - RNA, 20 nt, Artificial Sequence
  Synthetic oligonucleotide: TRAC-95
cugugguccagcugagguga

SEQ ID NO: 49369 - RNA, 20 nt, Artificial Sequence
  Synthetic oligonucleotide: TRAC-96
uggaauaaugcuguuguuga

SEQ ID NO: 49370 - RNA, 20 nt, Artificial Sequence
  Synthetic oligonucleotide: TRAC-97
ugugcuagacaugaggucua

SEQ ID NO: 49371 - RNA, 20 nt, Artificial Sequence
  Synthetic oligonucleotide: TRAC-98
aacaaaugugucacaaagua

SEQ ID NO: 49372 - RNA, 20 nt, Artificial Sequence
  Synthetic oligonucleotide: TRAC-99
cuucuuccccagcccaggua

SEQ ID NO: 49373 - RNA, 20 nt, Artificial Sequence
  Synthetic oligonucleotide: TRAC-100
uaggcagacagacuugucac

SEQ ID NO: 49374 - RNA, 20 nt, Artificial Sequence
  Synthetic oligonucleotide: TRAC-101
agcuuugaaacagguaagac

SEQ ID NO: 49375 - RNA, 20 nt, Artificial Sequence
  Synthetic oligonucleotide: TRAC-102
gacaccuucuuccccagccc

SEQ ID NO: 49376 - RNA, 20 nt, Artificial Sequence
  Synthetic oligonucleotide: TRAC-103
gguaagacaggggucuagcc

SEQ ID NO: 49377 - RNA, 20 nt, Artificial Sequence
  Synthetic oligonucleotide: TRAC-104
uccuccuccugaaaguggcc

SEQ ID NO: 49378 - RNA, 20 nt, Artificial Sequence
  Synthetic oligonucleotide: TRAC-105
agagcaacagugcuguggcc

SEQ ID NO: 49379 - RNA, 20 nt, Artificial Sequence
  Synthetic oligonucleotide: TRAC-106
aaagucagauuuguugcucc

SEQ ID NO: 49380 - RNA, 20 nt, Artificial Sequence
  Synthetic oligonucleotide: TRAC-107
aaguuccugugaugucaagc

SEQ ID NO: 49381 - RNA, 20 nt, Artificial Sequence
  Synthetic oligonucleotide: TRAC-108
gaggugaggggccuugaagc

SEQ ID NO: 49382 - RNA, 20 nt, Artificial Sequence
  Synthetic oligonucleotide: TRAC-109
ucaaggccccucaccucagc

SEQ ID NO: 49383 - RNA, 20 nt, Artificial Sequence
  Synthetic oligonucleotide: TRAC-110
uggauuuagagucucucagc

SEQ ID NO: 49384 - RNA, 20 nt, Artificial Sequence
  Synthetic oligonucleotide: TRAC-111
ggcagcuuuggugccuucgc

SEQ ID NO: 49385 - RNA, 20 nt, Artificial Sequence
  Synthetic oligonucleotide: TRAC-112
aaagcugcccuuaccugggc

SEQ ID NO: 49386 - RNA, 20 nt, Artificial Sequence
  Synthetic oligonucleotide: TRAC-113
auccuccuccugaaaguggc

SEQ ID NO: 49387 - RNA, 20 nt, Artificial Sequence
  Synthetic oligonucleotide: TRAC-114
agcugguacacggcaggguc

SEQ ID NO: 49388 - RNA, 20 nt, Artificial Sequence
  Synthetic oligonucleotide: TRAC-115
cuggggaagaaggugucuuc

SEQ ID NO: 49389 - RNA, 20 nt, Artificial Sequence
  Synthetic oligonucleotide: TRAC-116
acacggcagggucaggguuc

SEQ ID NO: 49390 - RNA, 20 nt, Artificial Sequence
  Synthetic oligonucleotide: TRAC-117
ccgaauccuccuccugaaag

SEQ ID NO: 49391 - RNA, 20 nt, Artificial Sequence
  Synthetic oligonucleotide: TRAC-118
cuggauaucugugggacaag

SEQ ID NO: 49392 - RNA, 20 nt, Artificial Sequence
  Synthetic oligonucleotide: TRAC-119
uucguaucuguaaaaccaag

SEQ ID NO: 49393 - RNA, 20 nt, Artificial Sequence
  Synthetic oligonucleotide: TRAC-120
cuuugaaacagguaagacag

SEQ ID NO: 49394 - RNA, 20 nt, Artificial Sequence
  Synthetic oligonucleotide: TRAC-121
aggggccuugaagcugggag

SEQ ID NO: 49395 - RNA, 20 nt, Artificial Sequence
  Synthetic oligonucleotide: TRAC-122
ugugguccagcugaggugag

SEQ ID NO: 49396 - RNA, 20 nt, Artificial Sequence
  Synthetic oligonucleotide: TRAC-123
acaaaacugugcuagacaug

SEQ ID NO: 49397 - RNA, 20 nt, Artificial Sequence
  Synthetic oligonucleotide: TRAC-124
cugcggcugugguccagcug

SEQ ID NO: 49398 - RNA, 20 nt, Artificial Sequence
  Synthetic oligonucleotide: TRAC-125
uuaaucugcucaugacgcug

SEQ ID NO: 49399 - RNA, 20 nt, Artificial Sequence
  Synthetic oligonucleotide: TRAC-126
ugcucaugacgcugcggcug

SEQ ID NO: 49400 - RNA, 20 nt, Artificial Sequence
  Synthetic oligonucleotide: TRAC-127
agcugcccuuaccugggcug

SEQ ID NO: 49401 - RNA, 20 nt, Artificial Sequence
  Synthetic oligonucleotide: TRAC-128
cuucaagagcaacagugcug

SEQ ID NO: 49402 - RNA, 20 nt, Artificial Sequence
  Synthetic oligonucleotide: TRAC-129
gucaggguucuggauaucug

SEQ ID NO: 49403 - RNA, 20 nt, Artificial Sequence
  Synthetic oligonucleotide: TRAC-130
gggccuugaagcugggagug

SEQ ID NO: 49404 - RNA, 20 nt, Artificial Sequence
  Synthetic oligonucleotide: TRAC-131
gcugugguccagcugaggug

SEQ ID NO: 49405 - RNA, 20 nt, Artificial Sequence
  Synthetic oligonucleotide: TRAC-132
auuuguuugagaaucaaaau

SEQ ID NO: 49406 - RNA, 20 nt, Artificial Sequence
  Synthetic oligonucleotide: TRAC-133
uuucaaaaccugucagugau

SEQ ID NO: 49407 - RNA, 20 nt, Artificial Sequence
  Synthetic oligonucleotide: TRAC-134
caccaaagcugcccuuaccu

SEQ ID NO: 49408 - RNA, 20 nt, Artificial Sequence
  Synthetic oligonucleotide: TRAC-135
aggugaggggccuugaagcu

SEQ ID NO: 49409 - RNA, 20 nt, Artificial Sequence
  Synthetic oligonucleotide: TRAC-136
aagcugcccuuaccugggcu

SEQ ID NO: 49410 - RNA, 20 nt, Artificial Sequence
  Synthetic oligonucleotide: TRAC-137
ggggccuugaagcugggagu

SEQ ID NO: 49411 - RNA, 20 nt, Artificial Sequence
  Synthetic oligonucleotide: TRAC-138
ccacuuucaggaggaggauu

SEQ ID NO: 49412 - RNA, 20 nt, Artificial Sequence
  Synthetic oligonucleotide: TRAC-139
uucaaaaccugucagugauu

SEQ ID NO: 49413 - RNA, 20 nt, Artificial Sequence
  Synthetic oligonucleotide: TRAC-140
agcccagguaagggcagcuu

SEQ ID NO: 49414 - RNA, 20 nt, Artificial Sequence
  Synthetic oligonucleotide: TRAC-141
gggacaagaggaucaggguu

SEQ ID NO: 49415 - RNA, 20 nt, Artificial Sequence
  Synthetic oligonucleotide: TRAC-142
cugacagguuuugaaaguuu

SEQ ID NO: 49416 - RNA, 21 nt, Artificial Sequence
  Synthetic oligonucleotide: TRAC-143
uucuggauaucugugggacaa

SEQ ID NO: 49417 - RNA, 22 nt, Artificial Sequence
  Synthetic oligonucleotide: TRAC-144
guucuggauaucugugggacaa

SEQ ID NO: 49418 - RNA, 23 nt, Artificial Sequence
  Synthetic oligonucleotide: TRAC-145
gguucuggauaucugugggacaa

SEQ ID NO: 49419 - RNA, 24 nt, Artificial Sequence
  Synthetic oligonucleotide: TRAC-146
ggguucuggauaucugugggacaa

SEQ ID NO: 49420 - RNA, 21 nt, Artificial Sequence
  Synthetic oligonucleotide: TRAC-147
gcuggggaagaaggugucuuc

SEQ ID NO: 49421 - RNA, 22 nt, Artificial Sequence
  Synthetic oligonucleotide: TRAC-148
ggcuggggaagaaggugucuuc

SEQ ID NO: 49422 - RNA, 23 nt, Artificial Sequence
  Synthetic oligonucleotide: TRAC-149
gggcuggggaagaaggugucuuc

SEQ ID NO: 49423 - RNA, 24 nt, Artificial Sequence
  Synthetic oligonucleotide: TRAC-150
ugggcuggggaagaaggugucuuc

SEQ ID NO: 49424 - RNA, 21 nt, Artificial Sequence
  Synthetic oligonucleotide: TRAC-151
aaacccggccacuuucaggag

SEQ ID NO: 49425 - RNA, 22 nt, Artificial Sequence
  Synthetic oligonucleotide: TRAC-152
uaaacccggccacuuucaggag

SEQ ID NO: 49426 - RNA, 23 nt, Artificial Sequence
  Synthetic oligonucleotide: TRAC-153
uuaaacccggccacuuucaggag

SEQ ID NO: 49427 - RNA, 24 nt, Artificial Sequence
  Synthetic oligonucleotide: TRAC-154
auuaaacccggccacuuucaggag

SEQ ID NO: 49428 - RNA, 18 nt, Artificial Sequence
  Synthetic oligonucleotide: TRAC-155
guuugagaaucaaaaucg

SEQ ID NO: 49429 - RNA, 19 nt, Artificial Sequence
  Synthetic oligonucleotide: TRAC-156
uguuugagaaucaaaaucg

SEQ ID NO: 49430 - RNA, 20 nt, Artificial Sequence
  Synthetic oligonucleotide: TRAC-157
uuguuugagaaucaaaaucg

SEQ ID NO: 49431 - RNA, 21 nt, Artificial Sequence
  Synthetic oligonucleotide: TRAC-158
uuuguuugagaaucaaaaucg

SEQ ID NO: 49432 - RNA, 22 nt, Artificial Sequence
  Synthetic oligonucleotide: TRAC-159
auuuguuugagaaucaaaaucg

SEQ ID NO: 49433 - RNA, 23 nt, Artificial Sequence
  Synthetic oligonucleotide: TRAC-160
cauuuguuugagaaucaaaaucg

SEQ ID NO: 49434 - RNA, 24 nt, Artificial Sequence
  Synthetic oligonucleotide: TRAC-161
acauuuguuugagaaucaaaaucg

SEQ ID NO: 49435 - RNA, 21 nt, Artificial Sequence
  Synthetic oligonucleotide: TRAC-162
agucucucagcugguacacgg

SEQ ID NO: 49436 - RNA, 22 nt, Artificial Sequence
  Synthetic oligonucleotide: TRAC-163
gagucucucagcugguacacgg

SEQ ID NO: 49437 - RNA, 23 nt, Artificial Sequence
  Synthetic oligonucleotide: TRAC-164
agagucucucagcugguacacgg

SEQ ID NO: 49438 - RNA, 24 nt, Artificial Sequence
  Synthetic oligonucleotide: TRAC-165
uagagucucucagcugguacacgg

SEQ ID NO: 49439 - RNA, 21 nt, Artificial Sequence
  Synthetic oligonucleotide: TRAC-166
uuuugucugugauauacacau

SEQ ID NO: 49440 - RNA, 22 nt, Artificial Sequence
  Synthetic oligonucleotide: TRAC-167
guuuugucugugauauacacau

SEQ ID NO: 49441 - RNA, 23 nt, Artificial Sequence
  Synthetic oligonucleotide: TRAC-168
aguuuugucugugauauacacau

SEQ ID NO: 49442 - RNA, 24 nt, Artificial Sequence
  Synthetic oligonucleotide: TRAC-169
caguuuugucugugauauacacau

SEQ ID NO: 49443 - RNA, 21 nt, Artificial Sequence
  Synthetic oligonucleotide: TRAC-170
auaucugugggacaagaggau

SEQ ID NO: 49444 - RNA, 22 nt, Artificial Sequence
  Synthetic oligonucleotide: TRAC-171
gauaucugugggacaagaggau

SEQ ID NO: 49445 - RNA, 23 nt, Artificial Sequence
  Synthetic oligonucleotide: TRAC-172
ggauaucugugggacaagaggau

SEQ ID NO: 49446 - RNA, 24 nt, Artificial Sequence
  Synthetic oligonucleotide: TRAC-173
uggauaucugugggacaagaggau

SEQ ID NO: 49447 - RNA, 21 nt, Artificial Sequence
  Synthetic oligonucleotide: TRAC-174
agacagacuugucacuggauu

SEQ ID NO: 49448 - RNA, 22 nt, Artificial Sequence
  Synthetic oligonucleotide: TRAC-175
cagacagacuugucacuggauu

SEQ ID NO: 49449 - RNA, 23 nt, Artificial Sequence
  Synthetic oligonucleotide: TRAC-176
gcagacagacuugucacuggauu

SEQ ID NO: 49450 - RNA, 24 nt, Artificial Sequence
  Synthetic oligonucleotide: TRAC-177
ggcagacagacuugucacuggauu

SEQ ID NO: 49451 - RNA, 21 nt, Artificial Sequence
  Synthetic oligonucleotide: TRAC-178
guacacggcagggucaggguu

SEQ ID NO: 49452 - RNA, 22 nt, Artificial Sequence
  Synthetic oligonucleotide: TRAC-179
gguacacggcagggucaggguu

SEQ ID NO: 49453 - RNA, 23 nt, Artificial Sequence
  Synthetic oligonucleotide: TRAC-180
ugguacacggcagggucaggguu

SEQ ID NO: 49454 - RNA, 24 nt, Artificial Sequence
  Synthetic oligonucleotide: TRAC-181
cugguacacggcagggucaggguu

SEQ ID NO: 49455 - RNA, 18 nt, Artificial Sequence
  Synthetic oligonucleotide: TRAC-182
uuugugacacauuuguuu

SEQ ID NO: 49456 - RNA, 19 nt, Artificial Sequence
  Synthetic oligonucleotide: TRAC-183
cuuugugacacauuuguuu

SEQ ID NO: 49457 - RNA, 20 nt, Artificial Sequence
  Synthetic oligonucleotide: TRAC-184
acuuugugacacauuuguuu

SEQ ID NO: 49458 - RNA, 21 nt, Artificial Sequence
  Synthetic oligonucleotide: TRAC-185
uacuuugugacacauuuguuu

SEQ ID NO: 49459 - RNA, 22 nt, Artificial Sequence
  Synthetic oligonucleotide: TRAC-186
uuacuuugugacacauuuguuu

SEQ ID NO: 49460 - RNA, 23 nt, Artificial Sequence
  Synthetic oligonucleotide: TRAC-187
cuuacuuugugacacauuuguuu

SEQ ID NO: 49461 - RNA, 24 nt, Artificial Sequence
  Synthetic oligonucleotide: TRAC-188
ccuuacuuugugacacauuuguuu

SEQ ID NO: 49462 - RNA, 21 nt, Artificial Sequence
  Synthetic oligonucleotide: TRAC-189
acuuucaaaaccugucaguga

SEQ ID NO: 49463 - RNA, 22 nt, Artificial Sequence
  Synthetic oligonucleotide: TRAC-190
aacuuucaaaaccugucaguga

SEQ ID NO: 49464 - RNA, 23 nt, Artificial Sequence
  Synthetic oligonucleotide: TRAC-191
aaacuuucaaaaccugucaguga

SEQ ID NO: 49465 - RNA, 24 nt, Artificial Sequence
  Synthetic oligonucleotide: TRAC-192
uaaacuuucaaaaccugucaguga

SEQ ID NO: 49466 - RNA, 21 nt, Artificial Sequence
  Synthetic oligonucleotide: TRAC-193
aagcuuugaaacagguaagac

SEQ ID NO: 49467 - RNA, 22 nt, Artificial Sequence
  Synthetic oligonucleotide: TRAC-194
aaagcuuugaaacagguaagac

SEQ ID NO: 49468 - RNA, 23 nt, Artificial Sequence
  Synthetic oligonucleotide: TRAC-195
aaaagcuuugaaacagguaagac

SEQ ID NO: 49469 - RNA, 24 nt, Artificial Sequence
  Synthetic oligonucleotide: TRAC-196
gaaaagcuuugaaacagguaagac

SEQ ID NO: 49470 - RNA, 21 nt, Artificial Sequence
  Synthetic oligonucleotide: TRAC-197
cagguaagacaggggucuagc

SEQ ID NO: 49471 - RNA, 22 nt, Artificial Sequence
  Synthetic oligonucleotide: TRAC-198
acagguaagacaggggucuagc

SEQ ID NO: 49472 - RNA, 23 nt, Artificial Sequence
  Synthetic oligonucleotide: TRAC-199
aacagguaagacaggggucuagc

SEQ ID NO: 49473 - RNA, 24 nt, Artificial Sequence
  Synthetic oligonucleotide: TRAC-200
aaacagguaagacaggggucuagc

SEQ ID NO: 49474 - RNA, 21 nt, Artificial Sequence
  Synthetic oligonucleotide: TRAC-201
gaggggccuugaagcugggag

SEQ ID NO: 49475 - RNA, 22 nt, Artificial Sequence
  Synthetic oligonucleotide: TRAC-202
ugaggggccuugaagcugggag

SEQ ID NO: 49476 - RNA, 23 nt, Artificial Sequence
  Synthetic oligonucleotide: TRAC-203
gugaggggccuugaagcugggag

SEQ ID NO: 49477 - RNA, 24 nt, Artificial Sequence
  Synthetic oligonucleotide: TRAC-204
ggugaggggccuugaagcugggag

SEQ ID NO: 49478 - RNA, 21 nt, Artificial Sequence
  Synthetic oligonucleotide: TRAC-205
gaauccuccuccugaaagugg

SEQ ID NO: 49479 - RNA, 22 nt, Artificial Sequence
  Synthetic oligonucleotide: TRAC-206
cgaauccuccuccugaaagugg

SEQ ID NO: 49480 - RNA, 23 nt, Artificial Sequence
  Synthetic oligonucleotide: TRAC-207
ccgaauccuccuccugaaagugg

SEQ ID NO: 49481 - RNA, 24 nt, Artificial Sequence
  Synthetic oligonucleotide: TRAC-208
uccgaauccuccuccugaaagugg

SEQ ID NO: 49482 - RNA, 21 nt, Artificial Sequence
  Synthetic oligonucleotide: TRAC-209
gaggugaggggccuugaagcu

SEQ ID NO: 49483 - RNA, 22 nt, Artificial Sequence
  Synthetic oligonucleotide: TRAC-210
ugaggugaggggccuugaagcu

SEQ ID NO: 49484 - RNA, 23 nt, Artificial Sequence
  Synthetic oligonucleotide: TRAC-211
cugaggugaggggccuugaagcu

SEQ ID NO: 49485 - RNA, 24 nt, Artificial Sequence
  Synthetic oligonucleotide: TRAC-212
gcugaggugaggggccuugaagcu

SEQ ID NO: 49486 - RNA, 21 nt, Artificial Sequence
  Synthetic oligonucleotide: TRAC-213
caaacaaaugugucacaaagu

SEQ ID NO: 49487 - RNA, 22 nt, Artificial Sequence
  Synthetic oligonucleotide: TRAC-214
ucaaacaaaugugucacaaagu

SEQ ID NO: 49488 - RNA, 23 nt, Artificial Sequence
  Synthetic oligonucleotide: TRAC-215
cucaaacaaaugugucacaaagu

SEQ ID NO: 49489 - RNA, 24 nt, Artificial Sequence
  Synthetic oligonucleotide: TRAC-216
ucucaaacaaaugugucacaaagu

SEQ ID NO: 49490 - RNA, 18 nt, Artificial Sequence
  Synthetic oligonucleotide: TRAC-217
ccugucagugauuggguu

SEQ ID NO: 49491 - RNA, 19 nt, Artificial Sequence
  Synthetic oligonucleotide: TRAC-218
accugucagugauuggguu

SEQ ID NO: 49492 - RNA, 20 nt, Artificial Sequence
  Synthetic oligonucleotide: TRAC-219
aaccugucagugauuggguu

SEQ ID NO: 49493 - RNA, 21 nt, Artificial Sequence
  Synthetic oligonucleotide: TRAC-220
aaaccugucagugauuggguu

SEQ ID NO: 49494 - RNA, 22 nt, Artificial Sequence
  Synthetic oligonucleotide: TRAC-221
aaaaccugucagugauuggguu

SEQ ID NO: 49495 - RNA, 23 nt, Artificial Sequence
  Synthetic oligonucleotide: TRAC-222
caaaaccugucagugauuggguu

SEQ ID NO: 49496 - RNA, 24 nt, Artificial Sequence
  Synthetic oligonucleotide: TRAC-223
ucaaaaccugucagugauuggguu

SEQ ID NO: 49497 - RNA, 18 nt, Artificial Sequence
  Synthetic oligonucleotide: TRAC-224
uggauaucugugggacaa

SEQ ID NO: 49498 - RNA, 19 nt, Artificial Sequence
  Synthetic oligonucleotide: TRAC-225
cuggauaucugugggacaa

SEQ ID NO: 49499 - RNA, 20 nt, Artificial Sequence
  Synthetic oligonucleotide: TRAC-226
ucuggauaucugugggacaa

SEQ ID NO: 49500 - RNA, 18 nt, Artificial Sequence
  Synthetic oligonucleotide: TRAC-227
aggcagacagacuuguca

SEQ ID NO: 49501 - RNA, 19 nt, Artificial Sequence
  Synthetic oligonucleotide: TRAC-228
uaggcagacagacuuguca

SEQ ID NO: 49502 - RNA, 20 nt, Artificial Sequence
  Synthetic oligonucleotide: TRAC-229
auaggcagacagacuuguca

SEQ ID NO: 49503 - RNA, 21 nt, Artificial Sequence
  Synthetic oligonucleotide: TRAC-230
aauaggcagacagacuuguca

SEQ ID NO: 49504 - RNA, 22 nt, Artificial Sequence
  Synthetic oligonucleotide: TRAC-231
gaauaggcagacagacuuguca

SEQ ID NO: 49505 - RNA, 23 nt, Artificial Sequence
  Synthetic oligonucleotide: TRAC-232
ugaauaggcagacagacuuguca

SEQ ID NO: 49506 - RNA, 24 nt, Artificial Sequence
  Synthetic oligonucleotide: TRAC-233
gugaauaggcagacagacuuguca

SEQ ID NO: 49507 - RNA, 18 nt, Artificial Sequence
  Synthetic oligonucleotide: TRAC-234
ggggaagaaggugucuuc

SEQ ID NO: 49508 - RNA, 19 nt, Artificial Sequence
  Synthetic oligonucleotide: TRAC-235
uggggaagaaggugucuuc

SEQ ID NO: 49509 - RNA, 20 nt, Artificial Sequence
  Synthetic oligonucleotide: TRAC-115
cuggggaagaaggugucuuc

SEQ ID NO: 49510 - RNA, 18 nt, Artificial Sequence
  Synthetic oligonucleotide: TRAC-236
cccggccacuuucaggag

SEQ ID NO: 49511 - RNA, 19 nt, Artificial Sequence
  Synthetic oligonucleotide: TRAC-237
acccggccacuuucaggag

SEQ ID NO: 49512 - RNA, 20 nt, Artificial Sequence
  Synthetic oligonucleotide: TRAC-238
aacccggccacuuucaggag

SEQ ID NO: 49513 - RNA, 18 nt, Artificial Sequence
  Synthetic oligonucleotide: TRAC-239
cucucagcugguacacgg

SEQ ID NO: 49514 - RNA, 19 nt, Artificial Sequence
  Synthetic oligonucleotide: TRAC-240
ucucucagcugguacacgg

SEQ ID NO: 49515 - RNA, 20 nt, Artificial Sequence
  Synthetic oligonucleotide: TRAC-241
gucucucagcugguacacgg

SEQ ID NO: 49516 - RNA, 18 nt, Artificial Sequence
  Synthetic oligonucleotide: TRAC-242
ugucugugauauacacau

SEQ ID NO: 49517 - RNA, 19 nt, Artificial Sequence
  Synthetic oligonucleotide: TRAC-243
uugucugugauauacacau

SEQ ID NO: 49518 - RNA, 20 nt, Artificial Sequence
  Synthetic oligonucleotide: TRAC-244
uuugucugugauauacacau

SEQ ID NO: 49519 - RNA, 18 nt, Artificial Sequence
  Synthetic oligonucleotide: TRAC-245
ucugugggacaagaggau

SEQ ID NO: 49520 - RNA, 19 nt, Artificial Sequence
  Synthetic oligonucleotide: TRAC-246
aucugugggacaagaggau

SEQ ID NO: 49521 - RNA, 20 nt, Artificial Sequence
  Synthetic oligonucleotide: TRAC-247
uaucugugggacaagaggau

SEQ ID NO: 49522 - RNA, 18 nt, Artificial Sequence
  Synthetic oligonucleotide: TRAC-248
gcugguacacggcagggu

SEQ ID NO: 49523 - RNA, 19 nt, Artificial Sequence
  Synthetic oligonucleotide: TRAC-249
agcugguacacggcagggu

SEQ ID NO: 49524 - RNA, 20 nt, Artificial Sequence
  Synthetic oligonucleotide: TRAC-250
cagcugguacacggcagggu

SEQ ID NO: 49525 - RNA, 21 nt, Artificial Sequence
  Synthetic oligonucleotide: TRAC-251
ucagcugguacacggcagggu

SEQ ID NO: 49526 - RNA, 22 nt, Artificial Sequence
  Synthetic oligonucleotide: TRAC-252
cucagcugguacacggcagggu

SEQ ID NO: 49527 - RNA, 23 nt, Artificial Sequence
  Synthetic oligonucleotide: TRAC-253
ucucagcugguacacggcagggu

SEQ ID NO: 49528 - RNA, 24 nt, Artificial Sequence
  Synthetic oligonucleotide: TRAC-254
cucucagcugguacacggcagggu

SEQ ID NO: 49529 - RNA, 18 nt, Artificial Sequence
  Synthetic oligonucleotide: TRAC-255
cagacuugucacuggauu

SEQ ID NO: 49530 - RNA, 19 nt, Artificial Sequence
  Synthetic oligonucleotide: TRAC-256
acagacuugucacuggauu

SEQ ID NO: 49531 - RNA, 20 nt, Artificial Sequence
  Synthetic oligonucleotide: TRAC-257
gacagacuugucacuggauu

SEQ ID NO: 49532 - RNA, 18 nt, Artificial Sequence
  Synthetic oligonucleotide: TRAC-258
cacggcagggucaggguu

SEQ ID NO: 49533 - RNA, 19 nt, Artificial Sequence
  Synthetic oligonucleotide: TRAC-259
acacggcagggucaggguu

SEQ ID NO: 49534 - RNA, 20 nt, Artificial Sequence
  Synthetic oligonucleotide: TRAC-260
uacacggcagggucaggguu

SEQ ID NO: 49535 - RNA, 18 nt, Artificial Sequence
  Synthetic oligonucleotide: TRAC-261
uucaaaaccugucaguga

SEQ ID NO: 49536 - RNA, 19 nt, Artificial Sequence
  Synthetic oligonucleotide: TRAC-262
uuucaaaaccugucaguga

SEQ ID NO: 49537 - RNA, 20 nt, Artificial Sequence
  Synthetic oligonucleotide: TRAC-263
cuuucaaaaccugucaguga

SEQ ID NO: 49538 - RNA, 18 nt, Artificial Sequence
  Synthetic oligonucleotide: TRAC-264
cuuugaaacagguaagac

SEQ ID NO: 49539 - RNA, 19 nt, Artificial Sequence
  Synthetic oligonucleotide: TRAC-265
gcuuugaaacagguaagac

SEQ ID NO: 49540 - RNA, 20 nt, Artificial Sequence
  Synthetic oligonucleotide: TRAC-101
agcuuugaaacagguaagac

SEQ ID NO: 49541 - RNA, 18 nt, Artificial Sequence
  Synthetic oligonucleotide: TRAC-266
guaagacaggggucuagc

SEQ ID NO: 49542 - RNA, 19 nt, Artificial Sequence
  Synthetic oligonucleotide: TRAC-267
gguaagacaggggucuagc

SEQ ID NO: 49543 - RNA, 20 nt, Artificial Sequence
  Synthetic oligonucleotide: TRAC-268
agguaagacaggggucuagc

SEQ ID NO: 49544 - RNA, 18 nt, Artificial Sequence
  Synthetic oligonucleotide: TRAC-269
gggccuugaagcugggag

SEQ ID NO: 49545 - RNA, 19 nt, Artificial Sequence
  Synthetic oligonucleotide: TRAC-270
ggggccuugaagcugggag

SEQ ID NO: 49546 - RNA, 20 nt, Artificial Sequence
  Synthetic oligonucleotide: TRAC-121
aggggccuugaagcugggag

SEQ ID NO: 49547 - RNA, 18 nt, Artificial Sequence
  Synthetic oligonucleotide: TRAC-271
uccuccuccugaaagugg

SEQ ID NO: 49548 - RNA, 19 nt, Artificial Sequence
  Synthetic oligonucleotide: TRAC-272
auccuccuccugaaagugg

SEQ ID NO: 49549 - RNA, 20 nt, Artificial Sequence
  Synthetic oligonucleotide: TRAC-273
aauccuccuccugaaagugg

SEQ ID NO: 49550 - RNA, 18 nt, Artificial Sequence
  Synthetic oligonucleotide: TRAC-274
gugaggggccuugaagcu

SEQ ID NO: 49551 - RNA, 19 nt, Artificial Sequence
  Synthetic oligonucleotide: TRAC-275
ggugaggggccuugaagcu

SEQ ID NO: 49552 - RNA, 20 nt, Artificial Sequence
  Synthetic oligonucleotide: TRAC-135
aggugaggggccuugaagcu

SEQ ID NO: 49553 - RNA, 18 nt, Artificial Sequence
  Synthetic oligonucleotide: TRAC-276
acaaaugugucacaaagu

SEQ ID NO: 49554 - RNA, 19 nt, Artificial Sequence
  Synthetic oligonucleotide: TRAC-277
aacaaaugugucacaaagu

SEQ ID NO: 49555 - RNA, 20 nt, Artificial Sequence
  Synthetic oligonucleotide: TRAC-278
aaacaaaugugucacaaagu

SEQ ID NO: 49556 - RNA, 18 nt, Artificial Sequence
  Synthetic oligonucleotide: TRAC-279
ucacaggaacuuucuaaa

SEQ ID NO: 49557 - RNA, 19 nt, Artificial Sequence
  Synthetic oligonucleotide: TRAC-280
aucacaggaacuuucuaaa

SEQ ID NO: 49558 - RNA, 20 nt, Artificial Sequence
  Synthetic oligonucleotide: TRAC-88
caucacaggaacuuucuaaa

SEQ ID NO: 49559 - RNA, 21 nt, Artificial Sequence
  Synthetic oligonucleotide: TRAC-281
acaucacaggaacuuucuaaa

SEQ ID NO: 49560 - RNA, 22 nt, Artificial Sequence
  Synthetic oligonucleotide: TRAC-282
gacaucacaggaacuuucuaaa

SEQ ID NO: 49561 - RNA, 23 nt, Artificial Sequence
  Synthetic oligonucleotide: TRAC-283
ugacaucacaggaacuuucuaaa

SEQ ID NO: 49562 - RNA, 24 nt, Artificial Sequence
  Synthetic oligonucleotide: TRAC-284
uugacaucacaggaacuuucuaaa

SEQ ID NO: 49563 - RNA, 18 nt, Artificial Sequence
  Synthetic oligonucleotide: TRAC-285
aucacaggaacuuucuaa

SEQ ID NO: 49564 - RNA, 19 nt, Artificial Sequence
  Synthetic oligonucleotide: TRAC-286
caucacaggaacuuucuaa

SEQ ID NO: 49565 - RNA, 20 nt, Artificial Sequence
  Synthetic oligonucleotide: TRAC-287
acaucacaggaacuuucuaa

SEQ ID NO: 49566 - RNA, 21 nt, Artificial Sequence
  Synthetic oligonucleotide: TRAC-288
gacaucacaggaacuuucuaa

SEQ ID NO: 49567 - RNA, 22 nt, Artificial Sequence
  Synthetic oligonucleotide: TRAC-289
ugacaucacaggaacuuucuaa

SEQ ID NO: 49568 - RNA, 23 nt, Artificial Sequence
  Synthetic oligonucleotide: TRAC-290
uugacaucacaggaacuuucuaa

SEQ ID NO: 49569 - RNA, 24 nt, Artificial Sequence
  Synthetic oligonucleotide: TRAC-291
cuugacaucacaggaacuuucuaa

SEQ ID NO: 49570 - RNA, 18 nt, Artificial Sequence
  Synthetic oligonucleotide: TRAC-292
ucgaccagcuugacauca

SEQ ID NO: 49571 - RNA, 19 nt, Artificial Sequence
  Synthetic oligonucleotide: TRAC-293
cucgaccagcuugacauca

SEQ ID NO: 49572 - RNA, 20 nt, Artificial Sequence
  Synthetic oligonucleotide: TRAC-294
ucucgaccagcuugacauca

SEQ ID NO: 49573 - RNA, 21 nt, Artificial Sequence
  Synthetic oligonucleotide: TRAC-295
uucucgaccagcuugacauca

SEQ ID NO: 49574 - RNA, 22 nt, Artificial Sequence
  Synthetic oligonucleotide: TRAC-296
uuucucgaccagcuugacauca

SEQ ID NO: 49575 - RNA, 23 nt, Artificial Sequence
  Synthetic oligonucleotide: TRAC-297
uuuucucgaccagcuugacauca

SEQ ID NO: 49576 - RNA, 24 nt, Artificial Sequence
  Synthetic oligonucleotide: TRAC-298
cuuuucucgaccagcuugacauca

SEQ ID NO: 49577 - RNA, 18 nt, Artificial Sequence
  Synthetic oligonucleotide: TRAC-299
cgaccagcuugacaucac

SEQ ID NO: 49578 - RNA, 19 nt, Artificial Sequence
  Synthetic oligonucleotide: TRAC-300
ucgaccagcuugacaucac

SEQ ID NO: 49579 - RNA, 20 nt, Artificial Sequence
  Synthetic oligonucleotide: TRAC-6
cucgaccagcuugacaucac

SEQ ID NO: 49580 - RNA, 21 nt, Artificial Sequence
  Synthetic oligonucleotide: TRAC-301
ucucgaccagcuugacaucac

SEQ ID NO: 49581 - RNA, 22 nt, Artificial Sequence
  Synthetic oligonucleotide: TRAC-302
uucucgaccagcuugacaucac

SEQ ID NO: 49582 - RNA, 23 nt, Artificial Sequence
  Synthetic oligonucleotide: TRAC-303
uuucucgaccagcuugacaucac

SEQ ID NO: 49583 - RNA, 24 nt, Artificial Sequence
  Synthetic oligonucleotide: TRAC-304
uuuucucgaccagcuugacaucac

SEQ ID NO: 49584 - RNA, 18 nt, Artificial Sequence
  Synthetic oligonucleotide: TRAC-305
ucuggauaucugugggac

SEQ ID NO: 49585 - RNA, 19 nt, Artificial Sequence
  Synthetic oligonucleotide: TRAC-306
uucuggauaucugugggac

SEQ ID NO: 49586 - RNA, 20 nt, Artificial Sequence
  Synthetic oligonucleotide: TRAC-307
guucuggauaucugugggac

SEQ ID NO: 49587 - RNA, 21 nt, Artificial Sequence
  Synthetic oligonucleotide: TRAC-308
gguucuggauaucugugggac

SEQ ID NO: 49588 - RNA, 22 nt, Artificial Sequence
  Synthetic oligonucleotide: TRAC-309
ggguucuggauaucugugggac

SEQ ID NO: 49589 - RNA, 23 nt, Artificial Sequence
  Synthetic oligonucleotide: TRAC-310
aggguucuggauaucugugggac

SEQ ID NO: 49590 - RNA, 24 nt, Artificial Sequence
  Synthetic oligonucleotide: TRAC-311
caggguucuggauaucugugggac

SEQ ID NO: 49591 - RNA, 18 nt, Artificial Sequence
  Synthetic oligonucleotide: TRAC-312
caccaaagcugcccuuac

SEQ ID NO: 49592 - RNA, 19 nt, Artificial Sequence
  Synthetic oligonucleotide: TRAC-313
gcaccaaagcugcccuuac

SEQ ID NO: 49593 - RNA, 20 nt, Artificial Sequence
  Synthetic oligonucleotide: TRAC-314
ggcaccaaagcugcccuuac

SEQ ID NO: 49594 - RNA, 21 nt, Artificial Sequence
  Synthetic oligonucleotide: TRAC-315
aggcaccaaagcugcccuuac

SEQ ID NO: 49595 - RNA, 22 nt, Artificial Sequence
  Synthetic oligonucleotide: TRAC-316
aaggcaccaaagcugcccuuac

SEQ ID NO: 49596 - RNA, 23 nt, Artificial Sequence
  Synthetic oligonucleotide: TRAC-317
gaaggcaccaaagcugcccuuac

SEQ ID NO: 49597 - RNA, 24 nt, Artificial Sequence
  Synthetic oligonucleotide: TRAC-318
cgaaggcaccaaagcugcccuuac

SEQ ID NO: 49598 - RNA, 18 nt, Artificial Sequence
  Synthetic oligonucleotide: TRAC-319
guucguaucuguaaaacc

SEQ ID NO: 49599 - RNA, 19 nt, Artificial Sequence
  Synthetic oligonucleotide: TRAC-320
gguucguaucuguaaaacc

SEQ ID NO: 49600 - RNA, 20 nt, Artificial Sequence
  Synthetic oligonucleotide: TRAC-321
agguucguaucuguaaaacc

SEQ ID NO: 49601 - RNA, 21 nt, Artificial Sequence
  Synthetic oligonucleotide: TRAC-322
uagguucguaucuguaaaacc

SEQ ID NO: 49602 - RNA, 22 nt, Artificial Sequence
  Synthetic oligonucleotide: TRAC-323
uuagguucguaucuguaaaacc

SEQ ID NO: 49603 - RNA, 23 nt, Artificial Sequence
  Synthetic oligonucleotide: TRAC-324
uuuagguucguaucuguaaaacc

SEQ ID NO: 49604 - RNA, 24 nt, Artificial Sequence
  Synthetic oligonucleotide: TRAC-325
guuuagguucguaucuguaaaacc

SEQ ID NO: 49605 - RNA, 18 nt, Artificial Sequence
  Synthetic oligonucleotide: TRAC-326
agcugcccuuaccugggc

SEQ ID NO: 49606 - RNA, 19 nt, Artificial Sequence
  Synthetic oligonucleotide: TRAC-327
aagcugcccuuaccugggc

SEQ ID NO: 49607 - RNA, 20 nt, Artificial Sequence
  Synthetic oligonucleotide: TRAC-112
aaagcugcccuuaccugggc

SEQ ID NO: 49608 - RNA, 21 nt, Artificial Sequence
  Synthetic oligonucleotide: TRAC-328
caaagcugcccuuaccugggc

SEQ ID NO: 49609 - RNA, 22 nt, Artificial Sequence
  Synthetic oligonucleotide: TRAC-329
ccaaagcugcccuuaccugggc

SEQ ID NO: 49610 - RNA, 23 nt, Artificial Sequence
  Synthetic oligonucleotide: TRAC-330
accaaagcugcccuuaccugggc

SEQ ID NO: 49611 - RNA, 24 nt, Artificial Sequence
  Synthetic oligonucleotide: TRAC-331
caccaaagcugcccuuaccugggc

SEQ ID NO: 49612 - RNA, 18 nt, Artificial Sequence
  Synthetic oligonucleotide: TRAC-332
gccacagcacuguugcuc

SEQ ID NO: 49613 - RNA, 19 nt, Artificial Sequence
  Synthetic oligonucleotide: TRAC-333
ggccacagcacuguugcuc

SEQ ID NO: 49614 - RNA, 20 nt, Artificial Sequence
  Synthetic oligonucleotide: TRAC-334
aggccacagcacuguugcuc

SEQ ID NO: 49615 - RNA, 21 nt, Artificial Sequence
  Synthetic oligonucleotide: TRAC-335
caggccacagcacuguugcuc

SEQ ID NO: 49616 - RNA, 22 nt, Artificial Sequence
  Synthetic oligonucleotide: TRAC-336
ccaggccacagcacuguugcuc

SEQ ID NO: 49617 - RNA, 23 nt, Artificial Sequence
  Synthetic oligonucleotide: TRAC-337
uccaggccacagcacuguugcuc

SEQ ID NO: 49618 - RNA, 24 nt, Artificial Sequence
  Synthetic oligonucleotide: TRAC-338
cuccaggccacagcacuguugcuc

SEQ ID NO: 49619 - RNA, 18 nt, Artificial Sequence
  Synthetic oligonucleotide: TRAC-339
gaccacagccgcagcguc

SEQ ID NO: 49620 - RNA, 19 nt, Artificial Sequence
  Synthetic oligonucleotide: TRAC-340
ggaccacagccgcagcguc

SEQ ID NO: 49621 - RNA, 20 nt, Artificial Sequence
  Synthetic oligonucleotide: TRAC-341
uggaccacagccgcagcguc

SEQ ID NO: 49622 - RNA, 21 nt, Artificial Sequence
  Synthetic oligonucleotide: TRAC-342
cuggaccacagccgcagcguc

SEQ ID NO: 49623 - RNA, 22 nt, Artificial Sequence
  Synthetic oligonucleotide: TRAC-343
gcuggaccacagccgcagcguc

SEQ ID NO: 49624 - RNA, 23 nt, Artificial Sequence
  Synthetic oligonucleotide: TRAC-344
agcuggaccacagccgcagcguc

SEQ ID NO: 49625 - RNA, 24 nt, Artificial Sequence
  Synthetic oligonucleotide: TRAC-345
cagcuggaccacagccgcagcguc

SEQ ID NO: 49626 - RNA, 18 nt, Artificial Sequence
  Synthetic oligonucleotide: TRAC-346
uuaaacccggccacuuuc

SEQ ID NO: 49627 - RNA, 19 nt, Artificial Sequence
  Synthetic oligonucleotide: TRAC-347
auuaaacccggccacuuuc

SEQ ID NO: 49628 - RNA, 20 nt, Artificial Sequence
  Synthetic oligonucleotide: TRAC-12
gauuaaacccggccacuuuc

SEQ ID NO: 49629 - RNA, 21 nt, Artificial Sequence
  Synthetic oligonucleotide: TRAC-348
agauuaaacccggccacuuuc

SEQ ID NO: 49630 - RNA, 22 nt, Artificial Sequence
  Synthetic oligonucleotide: TRAC-349
cagauuaaacccggccacuuuc

SEQ ID NO: 49631 - RNA, 23 nt, Artificial Sequence
  Synthetic oligonucleotide: TRAC-350
gcagauuaaacccggccacuuuc

SEQ ID NO: 49632 - RNA, 24 nt, Artificial Sequence
  Synthetic oligonucleotide: TRAC-351
agcagauuaaacccggccacuuuc

SEQ ID NO: 49633 - RNA, 18 nt, Artificial Sequence
  Synthetic oligonucleotide: TRAC-352
caaggccccucaccucag

SEQ ID NO: 49634 - RNA, 19 nt, Artificial Sequence
  Synthetic oligonucleotide: TRAC-353
ucaaggccccucaccucag

SEQ ID NO: 49635 - RNA, 20 nt, Artificial Sequence
  Synthetic oligonucleotide: TRAC-354
uucaaggccccucaccucag

SEQ ID NO: 49636 - RNA, 21 nt, Artificial Sequence
  Synthetic oligonucleotide: TRAC-355
cuucaaggccccucaccucag

SEQ ID NO: 49637 - RNA, 22 nt, Artificial Sequence
  Synthetic oligonucleotide: TRAC-356
gcuucaaggccccucaccucag

SEQ ID NO: 49638 - RNA, 23 nt, Artificial Sequence
  Synthetic oligonucleotide: TRAC-357
agcuucaaggccccucaccucag

SEQ ID NO: 49639 - RNA, 24 nt, Artificial Sequence
  Synthetic oligonucleotide: TRAC-358
cagcuucaaggccccucaccucag

SEQ ID NO: 49640 - RNA, 18 nt, Artificial Sequence
  Synthetic oligonucleotide: TRAC-359
aaacccggccacuuucag

SEQ ID NO: 49641 - RNA, 19 nt, Artificial Sequence
  Synthetic oligonucleotide: TRAC-360
uaaacccggccacuuucag

SEQ ID NO: 49642 - RNA, 20 nt, Artificial Sequence
  Synthetic oligonucleotide: TRAC-361
uuaaacccggccacuuucag

SEQ ID NO: 49643 - RNA, 21 nt, Artificial Sequence
  Synthetic oligonucleotide: TRAC-362
auuaaacccggccacuuucag

SEQ ID NO: 49644 - RNA, 22 nt, Artificial Sequence
  Synthetic oligonucleotide: TRAC-363
gauuaaacccggccacuuucag

SEQ ID NO: 49645 - RNA, 23 nt, Artificial Sequence
  Synthetic oligonucleotide: TRAC-364
agauuaaacccggccacuuucag

SEQ ID NO: 49646 - RNA, 24 nt, Artificial Sequence
  Synthetic oligonucleotide: TRAC-365
cagauuaaacccggccacuuucag

SEQ ID NO: 49647 - RNA, 18 nt, Artificial Sequence
  Synthetic oligonucleotide: TRAC-366
aacccggccacuuucagg

SEQ ID NO: 49648 - RNA, 19 nt, Artificial Sequence
  Synthetic oligonucleotide: TRAC-367
aaacccggccacuuucagg

SEQ ID NO: 49649 - RNA, 20 nt, Artificial Sequence
  Synthetic oligonucleotide: TRAC-14
uaaacccggccacuuucagg

SEQ ID NO: 49650 - RNA, 21 nt, Artificial Sequence
  Synthetic oligonucleotide: TRAC-368
uuaaacccggccacuuucagg

SEQ ID NO: 49651 - RNA, 22 nt, Artificial Sequence
  Synthetic oligonucleotide: TRAC-369
auuaaacccggccacuuucagg

SEQ ID NO: 49652 - RNA, 23 nt, Artificial Sequence
  Synthetic oligonucleotide: TRAC-370
gauuaaacccggccacuuucagg

SEQ ID NO: 49653 - RNA, 24 nt, Artificial Sequence
  Synthetic oligonucleotide: TRAC-371
agauuaaacccggccacuuucagg

SEQ ID NO: 49654 - RNA, 18 nt, Artificial Sequence
  Synthetic oligonucleotide: TRAC-372
cccuuaccugggcugggg

SEQ ID NO: 49655 - RNA, 19 nt, Artificial Sequence
  Synthetic oligonucleotide: TRAC-373
gcccuuaccugggcugggg

SEQ ID NO: 49656 - RNA, 20 nt, Artificial Sequence
  Synthetic oligonucleotide: TRAC-374
ugcccuuaccugggcugggg

SEQ ID NO: 49657 - RNA, 21 nt, Artificial Sequence
  Synthetic oligonucleotide: TRAC-375
cugcccuuaccugggcugggg

SEQ ID NO: 49658 - RNA, 22 nt, Artificial Sequence
  Synthetic oligonucleotide: TRAC-376
gcugcccuuaccugggcugggg

SEQ ID NO: 49659 - RNA, 23 nt, Artificial Sequence
  Synthetic oligonucleotide: TRAC-377
agcugcccuuaccugggcugggg

SEQ ID NO: 49660 - RNA, 24 nt, Artificial Sequence
  Synthetic oligonucleotide: TRAC-378
aagcugcccuuaccugggcugggg

SEQ ID NO: 49661 - RNA, 18 nt, Artificial Sequence
  Synthetic oligonucleotide: TRAC-379
aagcugcccuuaccuggg

SEQ ID NO: 49662 - RNA, 19 nt, Artificial Sequence
  Synthetic oligonucleotide: TRAC-380
aaagcugcccuuaccuggg

SEQ ID NO: 49663 - RNA, 20 nt, Artificial Sequence
  Synthetic oligonucleotide: TRAC-381
caaagcugcccuuaccuggg

SEQ ID NO: 49664 - RNA, 21 nt, Artificial Sequence
  Synthetic oligonucleotide: TRAC-382
ccaaagcugcccuuaccuggg

SEQ ID NO: 49665 - RNA, 22 nt, Artificial Sequence
  Synthetic oligonucleotide: TRAC-383
accaaagcugcccuuaccuggg

SEQ ID NO: 49666 - RNA, 23 nt, Artificial Sequence
  Synthetic oligonucleotide: TRAC-384
caccaaagcugcccuuaccuggg

SEQ ID NO: 49667 - RNA, 24 nt, Artificial Sequence
  Synthetic oligonucleotide: TRAC-385
gcaccaaagcugcccuuaccuggg

SEQ ID NO: 49668 - RNA, 18 nt, Artificial Sequence
  Synthetic oligonucleotide: TRAC-386
cugcccuuaccugggcug

SEQ ID NO: 49669 - RNA, 19 nt, Artificial Sequence
  Synthetic oligonucleotide: TRAC-387
gcugcccuuaccugggcug

SEQ ID NO: 49670 - RNA, 20 nt, Artificial Sequence
  Synthetic oligonucleotide: TRAC-127
agcugcccuuaccugggcug

SEQ ID NO: 49671 - RNA, 21 nt, Artificial Sequence
  Synthetic oligonucleotide: TRAC-388
aagcugcccuuaccugggcug

SEQ ID NO: 49672 - RNA, 22 nt, Artificial Sequence
  Synthetic oligonucleotide: TRAC-389
aaagcugcccuuaccugggcug

SEQ ID NO: 49673 - RNA, 23 nt, Artificial Sequence
  Synthetic oligonucleotide: TRAC-390
caaagcugcccuuaccugggcug

SEQ ID NO: 49674 - RNA, 24 nt, Artificial Sequence
  Synthetic oligonucleotide: TRAC-391
ccaaagcugcccuuaccugggcug

SEQ ID NO: 49675 - RNA, 18 nt, Artificial Sequence
  Synthetic oligonucleotide: TRAC-392
caggguucuggauaucug

SEQ ID NO: 49676 - RNA, 19 nt, Artificial Sequence
  Synthetic oligonucleotide: TRAC-393
ucaggguucuggauaucug

SEQ ID NO: 49677 - RNA, 20 nt, Artificial Sequence
  Synthetic oligonucleotide: TRAC-129
gucaggguucuggauaucug

SEQ ID NO: 49678 - RNA, 21 nt, Artificial Sequence
  Synthetic oligonucleotide: TRAC-394
ggucaggguucuggauaucug

SEQ ID NO: 49679 - RNA, 22 nt, Artificial Sequence
  Synthetic oligonucleotide: TRAC-395
gggucaggguucuggauaucug

SEQ ID NO: 49680 - RNA, 23 nt, Artificial Sequence
  Synthetic oligonucleotide: TRAC-396
agggucaggguucuggauaucug

SEQ ID NO: 49681 - RNA, 24 nt, Artificial Sequence
  Synthetic oligonucleotide: TRAC-397
cagggucaggguucuggauaucug

SEQ ID NO: 49682 - RNA, 18 nt, Artificial Sequence
  Synthetic oligonucleotide: TRAC-398
ucuggaauaaugcuguug

SEQ ID NO: 49683 - RNA, 19 nt, Artificial Sequence
  Synthetic oligonucleotide: TRAC-399
uucuggaauaaugcuguug

SEQ ID NO: 49684 - RNA, 20 nt, Artificial Sequence
  Synthetic oligonucleotide: TRAC-400
cuucuggaauaaugcuguug

SEQ ID NO: 49685 - RNA, 21 nt, Artificial Sequence
  Synthetic oligonucleotide: TRAC-401
ucuucuggaauaaugcuguug

SEQ ID NO: 49686 - RNA, 22 nt, Artificial Sequence
  Synthetic oligonucleotide: TRAC-402
gucuucuggaauaaugcuguug

SEQ ID NO: 49687 - RNA, 23 nt, Artificial Sequence
  Synthetic oligonucleotide: TRAC-403
ugucuucuggaauaaugcuguug

SEQ ID NO: 49688 - RNA, 24 nt, Artificial Sequence
  Synthetic oligonucleotide: TRAC-404
gugucuucuggaauaaugcuguug

SEQ ID NO: 49689 - RNA, 18 nt, Artificial Sequence
  Synthetic oligonucleotide: TRAC-405
cacuuucaggaggaggau

SEQ ID NO: 49690 - RNA, 19 nt, Artificial Sequence
  Synthetic oligonucleotide: TRAC-406
ccacuuucaggaggaggau

SEQ ID NO: 49691 - RNA, 20 nt, Artificial Sequence
  Synthetic oligonucleotide: TRAC-407
gccacuuucaggaggaggau

SEQ ID NO: 49692 - RNA, 21 nt, Artificial Sequence
  Synthetic oligonucleotide: TRAC-408
ggccacuuucaggaggaggau

SEQ ID NO: 49693 - RNA, 22 nt, Artificial Sequence
  Synthetic oligonucleotide: TRAC-409
cggccacuuucaggaggaggau

SEQ ID NO: 49694 - RNA, 23 nt, Artificial Sequence
  Synthetic oligonucleotide: TRAC-410
ccggccacuuucaggaggaggau

SEQ ID NO: 49695 - RNA, 24 nt, Artificial Sequence
  Synthetic oligonucleotide: TRAC-411
cccggccacuuucaggaggaggau

SEQ ID NO: 49696 - RNA, 18 nt, Artificial Sequence
  Synthetic oligonucleotide: TRAC-412
gcugcccuuaccugggcu

SEQ ID NO: 49697 - RNA, 19 nt, Artificial Sequence
  Synthetic oligonucleotide: TRAC-413
agcugcccuuaccugggcu

SEQ ID NO: 49698 - RNA, 20 nt, Artificial Sequence
  Synthetic oligonucleotide: TRAC-136
aagcugcccuuaccugggcu

SEQ ID NO: 49699 - RNA, 21 nt, Artificial Sequence
  Synthetic oligonucleotide: TRAC-414
aaagcugcccuuaccugggcu

SEQ ID NO: 49700 - RNA, 22 nt, Artificial Sequence
  Synthetic oligonucleotide: TRAC-415
caaagcugcccuuaccugggcu

SEQ ID NO: 49701 - RNA, 23 nt, Artificial Sequence
  Synthetic oligonucleotide: TRAC-416
ccaaagcugcccuuaccugggcu

SEQ ID NO: 49702 - RNA, 24 nt, Artificial Sequence
  Synthetic oligonucleotide: TRAC-417
accaaagcugcccuuaccugggcu

SEQ ID NO: 49703 - RNA, 18 nt, Artificial Sequence
  Synthetic oligonucleotide: TRAC-418
ucaggguucuggauaucu

SEQ ID NO: 49704 - RNA, 19 nt, Artificial Sequence
  Synthetic oligonucleotide: TRAC-419
gucaggguucuggauaucu

SEQ ID NO: 49705 - RNA, 20 nt, Artificial Sequence
  Synthetic oligonucleotide: TRAC-420
ggucaggguucuggauaucu

SEQ ID NO: 49706 - RNA, 21 nt, Artificial Sequence
  Synthetic oligonucleotide: TRAC-421
gggucaggguucuggauaucu

SEQ ID NO: 49707 - RNA, 22 nt, Artificial Sequence
  Synthetic oligonucleotide: TRAC-422
agggucaggguucuggauaucu

SEQ ID NO: 49708 - RNA, 23 nt, Artificial Sequence
  Synthetic oligonucleotide: TRAC-423
cagggucaggguucuggauaucu

SEQ ID NO: 49709 - RNA, 24 nt, Artificial Sequence
  Synthetic oligonucleotide: TRAC-424
gcagggucaggguucuggauaucu

SEQ ID NO: 49710 - RNA, 18 nt, Artificial Sequence
  Synthetic oligonucleotide: TRAC-425
ggacaagaggaucagggu

SEQ ID NO: 49711 - RNA, 19 nt, Artificial Sequence
  Synthetic oligonucleotide: TRAC-426
gggacaagaggaucagggu

SEQ ID NO: 49712 - RNA, 20 nt, Artificial Sequence
  Synthetic oligonucleotide: TRAC-427
ugggacaagaggaucagggu

SEQ ID NO: 49713 - RNA, 21 nt, Artificial Sequence
  Synthetic oligonucleotide: TRAC-428
gugggacaagaggaucagggu

SEQ ID NO: 49714 - RNA, 22 nt, Artificial Sequence
  Synthetic oligonucleotide: TRAC-429
ugugggacaagaggaucagggu

SEQ ID NO: 49715 - RNA, 23 nt, Artificial Sequence
  Synthetic oligonucleotide: TRAC-430
cugugggacaagaggaucagggu

SEQ ID NO: 49716 - RNA, 24 nt, Artificial Sequence
  Synthetic oligonucleotide: TRAC-431
ucugugggacaagaggaucagggu

SEQ ID NO: 49717 - RNA, 18 nt, Artificial Sequence
  Synthetic oligonucleotide: TRAC-432
acuuugugacacauuugu

SEQ ID NO: 49718 - RNA, 19 nt, Artificial Sequence
  Synthetic oligonucleotide: TRAC-433
uacuuugugacacauuugu

SEQ ID NO: 49719 - RNA, 20 nt, Artificial Sequence
  Synthetic oligonucleotide: TRAC-434
uuacuuugugacacauuugu

SEQ ID NO: 49720 - RNA, 21 nt, Artificial Sequence
  Synthetic oligonucleotide: TRAC-435
cuuacuuugugacacauuugu

SEQ ID NO: 49721 - RNA, 22 nt, Artificial Sequence
  Synthetic oligonucleotide: TRAC-436
ccuuacuuugugacacauuugu

SEQ ID NO: 49722 - RNA, 23 nt, Artificial Sequence
  Synthetic oligonucleotide: TRAC-437
uccuuacuuugugacacauuugu

SEQ ID NO: 49723 - RNA, 24 nt, Artificial Sequence
  Synthetic oligonucleotide: TRAC-438
auccuuacuuugugacacauuugu

SEQ ID NO: 49724 - RNA, 18 nt, Artificial Sequence
  Synthetic oligonucleotide: TRAC-439
acuuucaggaggaggauu

SEQ ID NO: 49725 - RNA, 19 nt, Artificial Sequence
  Synthetic oligonucleotide: TRAC-440
cacuuucaggaggaggauu

SEQ ID NO: 49726 - RNA, 20 nt, Artificial Sequence
  Synthetic oligonucleotide: TRAC-138
ccacuuucaggaggaggauu

SEQ ID NO: 49727 - RNA, 21 nt, Artificial Sequence
  Synthetic oligonucleotide: TRAC-441
gccacuuucaggaggaggauu

SEQ ID NO: 49728 - RNA, 22 nt, Artificial Sequence
  Synthetic oligonucleotide: TRAC-442
ggccacuuucaggaggaggauu

SEQ ID NO: 49729 - RNA, 23 nt, Artificial Sequence
  Synthetic oligonucleotide: TRAC-443
cggccacuuucaggaggaggauu

SEQ ID NO: 49730 - RNA, 24 nt, Artificial Sequence
  Synthetic oligonucleotide: TRAC-444
ccggccacuuucaggaggaggauu

SEQ ID NO: 49731 - RNA, 18 nt, Artificial Sequence
  Synthetic oligonucleotide: TRAC-445
uggggaagaaggugucuu

SEQ ID NO: 49732 - RNA, 19 nt, Artificial Sequence
  Synthetic oligonucleotide: TRAC-446
cuggggaagaaggugucuu

SEQ ID NO: 49733 - RNA, 20 nt, Artificial Sequence
  Synthetic oligonucleotide: TRAC-447
gcuggggaagaaggugucuu

SEQ ID NO: 49734 - RNA, 21 nt, Artificial Sequence
  Synthetic oligonucleotide: TRAC-448
ggcuggggaagaaggugucuu

SEQ ID NO: 49735 - RNA, 22 nt, Artificial Sequence
  Synthetic oligonucleotide: TRAC-449
gggcuggggaagaaggugucuu

SEQ ID NO: 49736 - RNA, 23 nt, Artificial Sequence
  Synthetic oligonucleotide: TRAC-450
ugggcuggggaagaaggugucuu

SEQ ID NO: 49737 - RNA, 24 nt, Artificial Sequence
  Synthetic oligonucleotide: TRAC-451
cugggcuggggaagaaggugucuu

SEQ ID NO: 49738 - RNA, 18 nt, Artificial Sequence
  Synthetic oligonucleotide: TRAC-452
cccaaucacugacagguu

SEQ ID NO: 49739 - RNA, 19 nt, Artificial Sequence
  Synthetic oligonucleotide: TRAC-453
acccaaucacugacagguu

SEQ ID NO: 49740 - RNA, 20 nt, Artificial Sequence
  Synthetic oligonucleotide: TRAC-454
aacccaaucacugacagguu

SEQ ID NO: 49741 - RNA, 21 nt, Artificial Sequence
  Synthetic oligonucleotide: TRAC-455
gaacccaaucacugacagguu

SEQ ID NO: 49742 - RNA, 22 nt, Artificial Sequence
  Synthetic oligonucleotide: TRAC-456
ggaacccaaucacugacagguu

SEQ ID NO: 49743 - RNA, 23 nt, Artificial Sequence
  Synthetic oligonucleotide: TRAC-457
cggaacccaaucacugacagguu

SEQ ID NO: 49744 - RNA, 24 nt, Artificial Sequence
  Synthetic oligonucleotide: TRAC-458
ucggaacccaaucacugacagguu

SEQ ID NO: 49745 - RNA, 18 nt, Artificial Sequence
  Synthetic oligonucleotide: TRAC-459
auuaaacccggccacuuu

SEQ ID NO: 49746 - RNA, 19 nt, Artificial Sequence
  Synthetic oligonucleotide: TRAC-460
gauuaaacccggccacuuu

SEQ ID NO: 49747 - RNA, 20 nt, Artificial Sequence
  Synthetic oligonucleotide: TRAC-461
agauuaaacccggccacuuu

SEQ ID NO: 49748 - RNA, 21 nt, Artificial Sequence
  Synthetic oligonucleotide: TRAC-462
cagauuaaacccggccacuuu

SEQ ID NO: 49749 - RNA, 22 nt, Artificial Sequence
  Synthetic oligonucleotide: TRAC-463
gcagauuaaacccggccacuuu

SEQ ID NO: 49750 - RNA, 23 nt, Artificial Sequence
  Synthetic oligonucleotide: TRAC-464
agcagauuaaacccggccacuuu

SEQ ID NO: 49751 - RNA, 24 nt, Artificial Sequence
  Synthetic oligonucleotide: TRAC-465
gagcagauuaaacccggccacuuu

SEQ ID NO: 49752 - RNA, 18 nt, Artificial Sequence
  Synthetic oligonucleotide: TRAC-466
gcuuugaaacagguaaga

SEQ ID NO: 49753 - RNA, 19 nt, Artificial Sequence
  Synthetic oligonucleotide: TRAC-467
agcuuugaaacagguaaga

SEQ ID NO: 49754 - RNA, 20 nt, Artificial Sequence
  Synthetic oligonucleotide: TRAC-468
aagcuuugaaacagguaaga

SEQ ID NO: 49755 - RNA, 21 nt, Artificial Sequence
  Synthetic oligonucleotide: TRAC-469
aaagcuuugaaacagguaaga

SEQ ID NO: 49756 - RNA, 22 nt, Artificial Sequence
  Synthetic oligonucleotide: TRAC-470
aaaagcuuugaaacagguaaga

SEQ ID NO: 49757 - RNA, 23 nt, Artificial Sequence
  Synthetic oligonucleotide: TRAC-471
gaaaagcuuugaaacagguaaga

SEQ ID NO: 49758 - RNA, 24 nt, Artificial Sequence
  Synthetic oligonucleotide: TRAC-472
agaaaagcuuugaaacagguaaga

SEQ ID NO: 49759 - RNA, 18 nt, Artificial Sequence
  Synthetic oligonucleotide: TRAC-473
ggggccuugaagcuggga

SEQ ID NO: 49760 - RNA, 19 nt, Artificial Sequence
  Synthetic oligonucleotide: TRAC-474
aggggccuugaagcuggga

SEQ ID NO: 49761 - RNA, 20 nt, Artificial Sequence
  Synthetic oligonucleotide: TRAC-475
gaggggccuugaagcuggga

SEQ ID NO: 49762 - RNA, 21 nt, Artificial Sequence
  Synthetic oligonucleotide: TRAC-476
ugaggggccuugaagcuggga

SEQ ID NO: 49763 - RNA, 22 nt, Artificial Sequence
  Synthetic oligonucleotide: TRAC-477
gugaggggccuugaagcuggga

SEQ ID NO: 49764 - RNA, 23 nt, Artificial Sequence
  Synthetic oligonucleotide: TRAC-478
ggugaggggccuugaagcuggga

SEQ ID NO: 49765 - RNA, 24 nt, Artificial Sequence
  Synthetic oligonucleotide: TRAC-479
aggugaggggccuugaagcuggga

SEQ ID NO: 49766 - RNA, 18 nt, Artificial Sequence
  Synthetic oligonucleotide: TRAC-480
gacaaaacugugcuagac

SEQ ID NO: 49767 - RNA, 19 nt, Artificial Sequence
  Synthetic oligonucleotide: TRAC-481
agacaaaacugugcuagac

SEQ ID NO: 49768 - RNA, 20 nt, Artificial Sequence
  Synthetic oligonucleotide: TRAC-482
cagacaaaacugugcuagac

SEQ ID NO: 49769 - RNA, 21 nt, Artificial Sequence
  Synthetic oligonucleotide: TRAC-483
acagacaaaacugugcuagac

SEQ ID NO: 49770 - RNA, 22 nt, Artificial Sequence
  Synthetic oligonucleotide: TRAC-484
cacagacaaaacugugcuagac

SEQ ID NO: 49771 - RNA, 23 nt, Artificial Sequence
  Synthetic oligonucleotide: TRAC-485
ucacagacaaaacugugcuagac

SEQ ID NO: 49772 - RNA, 24 nt, Artificial Sequence
  Synthetic oligonucleotide: TRAC-486
aucacagacaaaacugugcuagac

SEQ ID NO: 49773 - RNA, 18 nt, Artificial Sequence
  Synthetic oligonucleotide: TRAC-487
cagcugaggugaggggcc

SEQ ID NO: 49774 - RNA, 19 nt, Artificial Sequence
  Synthetic oligonucleotide: TRAC-488
ccagcugaggugaggggcc

SEQ ID NO: 49775 - RNA, 20 nt, Artificial Sequence
  Synthetic oligonucleotide: TRAC-489
uccagcugaggugaggggcc

SEQ ID NO: 49776 - RNA, 21 nt, Artificial Sequence
  Synthetic oligonucleotide: TRAC-490
guccagcugaggugaggggcc

SEQ ID NO: 49777 - RNA, 22 nt, Artificial Sequence
  Synthetic oligonucleotide: TRAC-491
gguccagcugaggugaggggcc

SEQ ID NO: 49778 - RNA, 23 nt, Artificial Sequence
  Synthetic oligonucleotide: TRAC-492
ugguccagcugaggugaggggcc

SEQ ID NO: 49779 - RNA, 24 nt, Artificial Sequence
  Synthetic oligonucleotide: TRAC-493
gugguccagcugaggugaggggcc

SEQ ID NO: 49780 - RNA, 18 nt, Artificial Sequence
  Synthetic oligonucleotide: TRAC-494
agcaacagugcuguggcc

SEQ ID NO: 49781 - RNA, 19 nt, Artificial Sequence
  Synthetic oligonucleotide: TRAC-495
gagcaacagugcuguggcc

SEQ ID NO: 49782 - RNA, 20 nt, Artificial Sequence
  Synthetic oligonucleotide: TRAC-105
agagcaacagugcuguggcc

SEQ ID NO: 49783 - RNA, 21 nt, Artificial Sequence
  Synthetic oligonucleotide: TRAC-496
aagagcaacagugcuguggcc

SEQ ID NO: 49784 - RNA, 22 nt, Artificial Sequence
  Synthetic oligonucleotide: TRAC-497
caagagcaacagugcuguggcc

SEQ ID NO: 49785 - RNA, 23 nt, Artificial Sequence
  Synthetic oligonucleotide: TRAC-498
ucaagagcaacagugcuguggcc

SEQ ID NO: 49786 - RNA, 24 nt, Artificial Sequence
  Synthetic oligonucleotide: TRAC-499
uucaagagcaacagugcuguggcc

SEQ ID NO: 49787 - RNA, 18 nt, Artificial Sequence
  Synthetic oligonucleotide: TRAC-500
ggugaggggccuugaagc

SEQ ID NO: 49788 - RNA, 19 nt, Artificial Sequence
  Synthetic oligonucleotide: TRAC-501
aggugaggggccuugaagc

SEQ ID NO: 49789 - RNA, 20 nt, Artificial Sequence
  Synthetic oligonucleotide: TRAC-108
gaggugaggggccuugaagc

SEQ ID NO: 49790 - RNA, 21 nt, Artificial Sequence
  Synthetic oligonucleotide: TRAC-502
ugaggugaggggccuugaagc

SEQ ID NO: 49791 - RNA, 22 nt, Artificial Sequence
  Synthetic oligonucleotide: TRAC-503
cugaggugaggggccuugaagc

SEQ ID NO: 49792 - RNA, 23 nt, Artificial Sequence
  Synthetic oligonucleotide: TRAC-504
gcugaggugaggggccuugaagc

SEQ ID NO: 49793 - RNA, 24 nt, Artificial Sequence
  Synthetic oligonucleotide: TRAC-505
agcugaggugaggggccuugaagc

SEQ ID NO: 49794 - RNA, 18 nt, Artificial Sequence
  Synthetic oligonucleotide: TRAC-506
gagcaacagugcuguggc

SEQ ID NO: 49795 - RNA, 19 nt, Artificial Sequence
  Synthetic oligonucleotide: TRAC-507
agagcaacagugcuguggc

SEQ ID NO: 49796 - RNA, 20 nt, Artificial Sequence
  Synthetic oligonucleotide: TRAC-508
aagagcaacagugcuguggc

SEQ ID NO: 49797 - RNA, 21 nt, Artificial Sequence
  Synthetic oligonucleotide: TRAC-509
caagagcaacagugcuguggc

SEQ ID NO: 49798 - RNA, 22 nt, Artificial Sequence
  Synthetic oligonucleotide: TRAC-510
ucaagagcaacagugcuguggc

SEQ ID NO: 49799 - RNA, 23 nt, Artificial Sequence
  Synthetic oligonucleotide: TRAC-511
uucaagagcaacagugcuguggc

SEQ ID NO: 49800 - RNA, 24 nt, Artificial Sequence
  Synthetic oligonucleotide: TRAC-512
cuucaagagcaacagugcuguggc

SEQ ID NO: 49801 - RNA, 18 nt, Artificial Sequence
  Synthetic oligonucleotide: TRAC-513
ucuugucccacagauauc

SEQ ID NO: 49802 - RNA, 19 nt, Artificial Sequence
  Synthetic oligonucleotide: TRAC-514
cucuugucccacagauauc

SEQ ID NO: 49803 - RNA, 20 nt, Artificial Sequence
  Synthetic oligonucleotide: TRAC-515
ccucuugucccacagauauc

SEQ ID NO: 49804 - RNA, 21 nt, Artificial Sequence
  Synthetic oligonucleotide: TRAC-516
uccucuugucccacagauauc

SEQ ID NO: 49805 - RNA, 22 nt, Artificial Sequence
  Synthetic oligonucleotide: TRAC-517
auccucuugucccacagauauc

SEQ ID NO: 49806 - RNA, 23 nt, Artificial Sequence
  Synthetic oligonucleotide: TRAC-518
gauccucuugucccacagauauc

SEQ ID NO: 49807 - RNA, 24 nt, Artificial Sequence
  Synthetic oligonucleotide: TRAC-519
ugauccucuugucccacagauauc

SEQ ID NO: 49808 - RNA, 18 nt, Artificial Sequence
  Synthetic oligonucleotide: TRAC-520
ggguuccgaauccuccuc

SEQ ID NO: 49809 - RNA, 19 nt, Artificial Sequence
  Synthetic oligonucleotide: TRAC-521
uggguuccgaauccuccuc

SEQ ID NO: 49810 - RNA, 20 nt, Artificial Sequence
  Synthetic oligonucleotide: TRAC-522
uuggguuccgaauccuccuc

SEQ ID NO: 49811 - RNA, 21 nt, Artificial Sequence
  Synthetic oligonucleotide: TRAC-523
auuggguuccgaauccuccuc

SEQ ID NO: 49812 - RNA, 22 nt, Artificial Sequence
  Synthetic oligonucleotide: TRAC-524
gauuggguuccgaauccuccuc

SEQ ID NO: 49813 - RNA, 23 nt, Artificial Sequence
  Synthetic oligonucleotide: TRAC-525
ugauuggguuccgaauccuccuc

SEQ ID NO: 49814 - RNA, 24 nt, Artificial Sequence
  Synthetic oligonucleotide: TRAC-526
gugauuggguuccgaauccuccuc

SEQ ID NO: 49815 - RNA, 18 nt, Artificial Sequence
  Synthetic oligonucleotide: TRAC-527
ugugaugucaagcugguc

SEQ ID NO: 49816 - RNA, 19 nt, Artificial Sequence
  Synthetic oligonucleotide: TRAC-528
cugugaugucaagcugguc

SEQ ID NO: 49817 - RNA, 20 nt, Artificial Sequence
  Synthetic oligonucleotide: TRAC-529
ccugugaugucaagcugguc

SEQ ID NO: 49818 - RNA, 21 nt, Artificial Sequence
  Synthetic oligonucleotide: TRAC-530
uccugugaugucaagcugguc

SEQ ID NO: 49819 - RNA, 22 nt, Artificial Sequence
  Synthetic oligonucleotide: TRAC-531
uuccugugaugucaagcugguc

SEQ ID NO: 49820 - RNA, 23 nt, Artificial Sequence
  Synthetic oligonucleotide: TRAC-532
guuccugugaugucaagcugguc

SEQ ID NO: 49821 - RNA, 24 nt, Artificial Sequence
  Synthetic oligonucleotide: TRAC-533
aguuccugugaugucaagcugguc

SEQ ID NO: 49822 - RNA, 18 nt, Artificial Sequence
  Synthetic oligonucleotide: TRAC-534
ucaacaacagcauuauuc

SEQ ID NO: 49823 - RNA, 19 nt, Artificial Sequence
  Synthetic oligonucleotide: TRAC-535
uucaacaacagcauuauuc

SEQ ID NO: 49824 - RNA, 20 nt, Artificial Sequence
  Synthetic oligonucleotide: TRAC-536
cuucaacaacagcauuauuc

SEQ ID NO: 49825 - RNA, 21 nt, Artificial Sequence
  Synthetic oligonucleotide: TRAC-537
ccuucaacaacagcauuauuc

SEQ ID NO: 49826 - RNA, 22 nt, Artificial Sequence
  Synthetic oligonucleotide: TRAC-538
gccuucaacaacagcauuauuc

SEQ ID NO: 49827 - RNA, 23 nt, Artificial Sequence
  Synthetic oligonucleotide: TRAC-539
cgccuucaacaacagcauuauuc

SEQ ID NO: 49828 - RNA, 24 nt, Artificial Sequence
  Synthetic oligonucleotide: TRAC-540
acgccuucaacaacagcauuauuc

SEQ ID NO: 49829 - RNA, 18 nt, Artificial Sequence
  Synthetic oligonucleotide: TRAC-541
augaggucuauggacuuc

SEQ ID NO: 49830 - RNA, 19 nt, Artificial Sequence
  Synthetic oligonucleotide: TRAC-542
caugaggucuauggacuuc

SEQ ID NO: 49831 - RNA, 20 nt, Artificial Sequence
  Synthetic oligonucleotide: TRAC-543
acaugaggucuauggacuuc

SEQ ID NO: 49832 - RNA, 21 nt, Artificial Sequence
  Synthetic oligonucleotide: TRAC-544
gacaugaggucuauggacuuc

SEQ ID NO: 49833 - RNA, 22 nt, Artificial Sequence
  Synthetic oligonucleotide: TRAC-545
agacaugaggucuauggacuuc

SEQ ID NO: 49834 - RNA, 23 nt, Artificial Sequence
  Synthetic oligonucleotide: TRAC-546
uagacaugaggucuauggacuuc

SEQ ID NO: 49835 - RNA, 24 nt, Artificial Sequence
  Synthetic oligonucleotide: TRAC-547
cuagacaugaggucuauggacuuc

SEQ ID NO: 49836 - RNA, 18 nt, Artificial Sequence
  Synthetic oligonucleotide: TRAC-548
aggugaggggccuugaag

SEQ ID NO: 49837 - RNA, 19 nt, Artificial Sequence
  Synthetic oligonucleotide: TRAC-549
gaggugaggggccuugaag

SEQ ID NO: 49838 - RNA, 20 nt, Artificial Sequence
  Synthetic oligonucleotide: TRAC-550
ugaggugaggggccuugaag

SEQ ID NO: 49839 - RNA, 21 nt, Artificial Sequence
  Synthetic oligonucleotide: TRAC-551
cugaggugaggggccuugaag

SEQ ID NO: 49840 - RNA, 22 nt, Artificial Sequence
  Synthetic oligonucleotide: TRAC-552
gcugaggugaggggccuugaag

SEQ ID NO: 49841 - RNA, 23 nt, Artificial Sequence
  Synthetic oligonucleotide: TRAC-553
agcugaggugaggggccuugaag

SEQ ID NO: 49842 - RNA, 24 nt, Artificial Sequence
  Synthetic oligonucleotide: TRAC-554
cagcugaggugaggggccuugaag

SEQ ID NO: 49843 - RNA, 18 nt, Artificial Sequence
  Synthetic oligonucleotide: TRAC-555
gacccugccguguaccag

SEQ ID NO: 49844 - RNA, 19 nt, Artificial Sequence
  Synthetic oligonucleotide: TRAC-556
ugacccugccguguaccag

SEQ ID NO: 49845 - RNA, 20 nt, Artificial Sequence
  Synthetic oligonucleotide: TRAC-557
cugacccugccguguaccag

SEQ ID NO: 49846 - RNA, 21 nt, Artificial Sequence
  Synthetic oligonucleotide: TRAC-558
ccugacccugccguguaccag

SEQ ID NO: 49847 - RNA, 22 nt, Artificial Sequence
  Synthetic oligonucleotide: TRAC-559
cccugacccugccguguaccag

SEQ ID NO: 49848 - RNA, 23 nt, Artificial Sequence
  Synthetic oligonucleotide: TRAC-560
acccugacccugccguguaccag

SEQ ID NO: 49849 - RNA, 24 nt, Artificial Sequence
  Synthetic oligonucleotide: TRAC-561
aacccugacccugccguguaccag

SEQ ID NO: 49850 - RNA, 18 nt, Artificial Sequence
  Synthetic oligonucleotide: TRAC-562
gcugcggcugugguccag

SEQ ID NO: 49851 - RNA, 19 nt, Artificial Sequence
  Synthetic oligonucleotide: TRAC-563
cgcugcggcugugguccag

SEQ ID NO: 49852 - RNA, 20 nt, Artificial Sequence
  Synthetic oligonucleotide: TRAC-564
acgcugcggcugugguccag

SEQ ID NO: 49853 - RNA, 21 nt, Artificial Sequence
  Synthetic oligonucleotide: TRAC-565
gacgcugcggcugugguccag

SEQ ID NO: 49854 - RNA, 22 nt, Artificial Sequence
  Synthetic oligonucleotide: TRAC-566
ugacgcugcggcugugguccag

SEQ ID NO: 49855 - RNA, 23 nt, Artificial Sequence
  Synthetic oligonucleotide: TRAC-567
augacgcugcggcugugguccag

SEQ ID NO: 49856 - RNA, 24 nt, Artificial Sequence
  Synthetic oligonucleotide: TRAC-568
caugacgcugcggcugugguccag

SEQ ID NO: 49857 - RNA, 18 nt, Artificial Sequence
  Synthetic oligonucleotide: TRAC-569
ggcugugguccagcugag

SEQ ID NO: 49858 - RNA, 19 nt, Artificial Sequence
  Synthetic oligonucleotide: TRAC-570
cggcugugguccagcugag

SEQ ID NO: 49859 - RNA, 20 nt, Artificial Sequence
  Synthetic oligonucleotide: TRAC-571
gcggcugugguccagcugag

SEQ ID NO: 49860 - RNA, 21 nt, Artificial Sequence
  Synthetic oligonucleotide: TRAC-572
ugcggcugugguccagcugag

SEQ ID NO: 49861 - RNA, 22 nt, Artificial Sequence
  Synthetic oligonucleotide: TRAC-573
cugcggcugugguccagcugag

SEQ ID NO: 49862 - RNA, 23 nt, Artificial Sequence
  Synthetic oligonucleotide: TRAC-574
gcugcggcugugguccagcugag

SEQ ID NO: 49863 - RNA, 24 nt, Artificial Sequence
  Synthetic oligonucleotide: TRAC-575
cgcugcggcugugguccagcugag

SEQ ID NO: 49864 - RNA, 18 nt, Artificial Sequence
  Synthetic oligonucleotide: TRAC-576
ccugugaugucaagcugg

SEQ ID NO: 49865 - RNA, 19 nt, Artificial Sequence
  Synthetic oligonucleotide: TRAC-577
uccugugaugucaagcugg

SEQ ID NO: 49866 - RNA, 20 nt, Artificial Sequence
  Synthetic oligonucleotide: TRAC-578
uuccugugaugucaagcugg

SEQ ID NO: 49867 - RNA, 21 nt, Artificial Sequence
  Synthetic oligonucleotide: TRAC-579
guuccugugaugucaagcugg

SEQ ID NO: 49868 - RNA, 22 nt, Artificial Sequence
  Synthetic oligonucleotide: TRAC-580
aguuccugugaugucaagcugg

SEQ ID NO: 49869 - RNA, 23 nt, Artificial Sequence
  Synthetic oligonucleotide: TRAC-581
aaguuccugugaugucaagcugg

SEQ ID NO: 49870 - RNA, 24 nt, Artificial Sequence
  Synthetic oligonucleotide: TRAC-582
aaaguuccugugaugucaagcugg

SEQ ID NO: 49871 - RNA, 18 nt, Artificial Sequence
  Synthetic oligonucleotide: TRAC-583
ugugguccagcugaggug

SEQ ID NO: 49872 - RNA, 19 nt, Artificial Sequence
  Synthetic oligonucleotide: TRAC-584
cugugguccagcugaggug

SEQ ID NO: 49873 - RNA, 20 nt, Artificial Sequence
  Synthetic oligonucleotide: TRAC-131
gcugugguccagcugaggug

SEQ ID NO: 49874 - RNA, 21 nt, Artificial Sequence
  Synthetic oligonucleotide: TRAC-585
ggcugugguccagcugaggug

SEQ ID NO: 49875 - RNA, 22 nt, Artificial Sequence
  Synthetic oligonucleotide: TRAC-586
cggcugugguccagcugaggug

SEQ ID NO: 49876 - RNA, 23 nt, Artificial Sequence
  Synthetic oligonucleotide: TRAC-587
gcggcugugguccagcugaggug

SEQ ID NO: 49877 - RNA, 24 nt, Artificial Sequence
  Synthetic oligonucleotide: TRAC-588
ugcggcugugguccagcugaggug

SEQ ID NO: 49878 - RNA, 18 nt, Artificial Sequence
  Synthetic oligonucleotide: TRAC-589
ccucuugguuuuacagau

SEQ ID NO: 49879 - RNA, 19 nt, Artificial Sequence
  Synthetic oligonucleotide: TRAC-590
gccucuugguuuuacagau

SEQ ID NO: 49880 - RNA, 20 nt, Artificial Sequence
  Synthetic oligonucleotide: TRAC-591
ggccucuugguuuuacagau

SEQ ID NO: 49881 - RNA, 21 nt, Artificial Sequence
  Synthetic oligonucleotide: TRAC-592
uggccucuugguuuuacagau

SEQ ID NO: 49882 - RNA, 22 nt, Artificial Sequence
  Synthetic oligonucleotide: TRAC-593
guggccucuugguuuuacagau

SEQ ID NO: 49883 - RNA, 23 nt, Artificial Sequence
  Synthetic oligonucleotide: TRAC-594
uguggccucuugguuuuacagau

SEQ ID NO: 49884 - RNA, 24 nt, Artificial Sequence
  Synthetic oligonucleotide: TRAC-595
cuguggccucuugguuuuacagau

SEQ ID NO: 49885 - RNA, 18 nt, Artificial Sequence
  Synthetic oligonucleotide: TRAC-596
agcuggucgagaaaagcu

SEQ ID NO: 49886 - RNA, 19 nt, Artificial Sequence
  Synthetic oligonucleotide: TRAC-597
aagcuggucgagaaaagcu

SEQ ID NO: 49887 - RNA, 20 nt, Artificial Sequence
  Synthetic oligonucleotide: TRAC-598
caagcuggucgagaaaagcu

SEQ ID NO: 49888 - RNA, 21 nt, Artificial Sequence
  Synthetic oligonucleotide: TRAC-599
ucaagcuggucgagaaaagcu

SEQ ID NO: 49889 - RNA, 22 nt, Artificial Sequence
  Synthetic oligonucleotide: TRAC-600
gucaagcuggucgagaaaagcu

SEQ ID NO: 49890 - RNA, 23 nt, Artificial Sequence
  Synthetic oligonucleotide: TRAC-601
ugucaagcuggucgagaaaagcu

SEQ ID NO: 49891 - RNA, 24 nt, Artificial Sequence
  Synthetic oligonucleotide: TRAC-602
augucaagcuggucgagaaaagcu

SEQ ID NO: 49892 - RNA, 18 nt, Artificial Sequence
  Synthetic oligonucleotide: TRAC-603
cccugccguguaccagcu

SEQ ID NO: 49893 - RNA, 19 nt, Artificial Sequence
  Synthetic oligonucleotide: TRAC-604
acccugccguguaccagcu

SEQ ID NO: 49894 - RNA, 20 nt, Artificial Sequence
  Synthetic oligonucleotide: TRAC-605
gacccugccguguaccagcu

SEQ ID NO: 49895 - RNA, 21 nt, Artificial Sequence
  Synthetic oligonucleotide: TRAC-606
ugacccugccguguaccagcu

SEQ ID NO: 49896 - RNA, 22 nt, Artificial Sequence
  Synthetic oligonucleotide: TRAC-607
cugacccugccguguaccagcu

SEQ ID NO: 49897 - RNA, 23 nt, Artificial Sequence
  Synthetic oligonucleotide: TRAC-608
ccugacccugccguguaccagcu

SEQ ID NO: 49898 - RNA, 24 nt, Artificial Sequence
  Synthetic oligonucleotide: TRAC-609
cccugacccugccguguaccagcu

SEQ ID NO: 49899 - RNA, 18 nt, Artificial Sequence
  Synthetic oligonucleotide: TRAC-610
gugcuagacaugaggucu

SEQ ID NO: 49900 - RNA, 19 nt, Artificial Sequence
  Synthetic oligonucleotide: TRAC-611
ugugcuagacaugaggucu

SEQ ID NO: 49901 - RNA, 20 nt, Artificial Sequence
  Synthetic oligonucleotide: TRAC-612
cugugcuagacaugaggucu

SEQ ID NO: 49902 - RNA, 21 nt, Artificial Sequence
  Synthetic oligonucleotide: TRAC-613
acugugcuagacaugaggucu

SEQ ID NO: 49903 - RNA, 22 nt, Artificial Sequence
  Synthetic oligonucleotide: TRAC-614
aacugugcuagacaugaggucu

SEQ ID NO: 49904 - RNA, 23 nt, Artificial Sequence
  Synthetic oligonucleotide: TRAC-615
aaacugugcuagacaugaggucu

SEQ ID NO: 49905 - RNA, 24 nt, Artificial Sequence
  Synthetic oligonucleotide: TRAC-616
aaaacugugcuagacaugaggucu

SEQ ID NO: 49906 - RNA, 18 nt, Artificial Sequence
  Synthetic oligonucleotide: TRAC-617
uucuuccccagcccaggu

SEQ ID NO: 49907 - RNA, 19 nt, Artificial Sequence
  Synthetic oligonucleotide: TRAC-618
cuucuuccccagcccaggu

SEQ ID NO: 49908 - RNA, 20 nt, Artificial Sequence
  Synthetic oligonucleotide: TRAC-619
ccuucuuccccagcccaggu

SEQ ID NO: 49909 - RNA, 21 nt, Artificial Sequence
  Synthetic oligonucleotide: TRAC-620
accuucuuccccagcccaggu

SEQ ID NO: 49910 - RNA, 22 nt, Artificial Sequence
  Synthetic oligonucleotide: TRAC-621
caccuucuuccccagcccaggu

SEQ ID NO: 49911 - RNA, 23 nt, Artificial Sequence
  Synthetic oligonucleotide: TRAC-622
acaccuucuuccccagcccaggu

SEQ ID NO: 49912 - RNA, 24 nt, Artificial Sequence
  Synthetic oligonucleotide: TRAC-623
gacaccuucuuccccagcccaggu

SEQ ID NO: 49913 - RNA, 18 nt, Artificial Sequence
  Synthetic oligonucleotide: TRAC-624
cugugguccagcugaggu

SEQ ID NO: 49914 - RNA, 19 nt, Artificial Sequence
  Synthetic oligonucleotide: TRAC-625
gcugugguccagcugaggu

SEQ ID NO: 49915 - RNA, 20 nt, Artificial Sequence
  Synthetic oligonucleotide: TRAC-626
ggcugugguccagcugaggu

SEQ ID NO: 49916 - RNA, 21 nt, Artificial Sequence
  Synthetic oligonucleotide: TRAC-627
cggcugugguccagcugaggu

SEQ ID NO: 49917 - RNA, 22 nt, Artificial Sequence
  Synthetic oligonucleotide: TRAC-628
gcggcugugguccagcugaggu

SEQ ID NO: 49918 - RNA, 23 nt, Artificial Sequence
  Synthetic oligonucleotide: TRAC-629
ugcggcugugguccagcugaggu

SEQ ID NO: 49919 - RNA, 24 nt, Artificial Sequence
  Synthetic oligonucleotide: TRAC-630
cugcggcugugguccagcugaggu

SEQ ID NO: 49920 - RNA, 18 nt, Artificial Sequence
  Synthetic oligonucleotide: TRAC-631
aaugucuguuuuuccuuu

SEQ ID NO: 49921 - RNA, 19 nt, Artificial Sequence
  Synthetic oligonucleotide: TRAC-632
gaaugucuguuuuuccuuu

SEQ ID NO: 49922 - RNA, 20 nt, Artificial Sequence
  Synthetic oligonucleotide: TRAC-633
agaaugucuguuuuuccuuu

SEQ ID NO: 49923 - RNA, 21 nt, Artificial Sequence
  Synthetic oligonucleotide: TRAC-634
aagaaugucuguuuuuccuuu

SEQ ID NO: 49924 - RNA, 22 nt, Artificial Sequence
  Synthetic oligonucleotide: TRAC-635
aaagaaugucuguuuuuccuuu

SEQ ID NO: 49925 - RNA, 23 nt, Artificial Sequence
  Synthetic oligonucleotide: TRAC-636
gaaagaaugucuguuuuuccuuu

SEQ ID NO: 49926 - RNA, 24 nt, Artificial Sequence
  Synthetic oligonucleotide: TRAC-637
ugaaagaaugucuguuuuuccuuu

SEQ ID NO: 49927 - RNA, 17 nt, Artificial Sequence
  Synthetic oligonucleotide: TRAC-638
gcguuugcacaugcaaa

SEQ ID NO: 49928 - RNA, 17 nt, Artificial Sequence
  Synthetic oligonucleotide: TRAC-639
gucugccuauucaccga

SEQ ID NO: 49929 - RNA, 17 nt, Artificial Sequence
  Synthetic oligonucleotide: TRAC-640
cccggccacuuucagga

SEQ ID NO: 49930 - RNA, 17 nt, Artificial Sequence
  Synthetic oligonucleotide: TRAC-641
aggcagacagacuuguc

SEQ ID NO: 49931 - RNA, 17 nt, Artificial Sequence
  Synthetic oligonucleotide: TRAC-642
acaaaugugucacaaag

SEQ ID NO: 49932 - RNA, 17 nt, Artificial Sequence
  Synthetic oligonucleotide: TRAC-643
uccccagcccagguaag

SEQ ID NO: 49933 - RNA, 17 nt, Artificial Sequence
  Synthetic oligonucleotide: TRAC-644
augucaagcuggucgag

SEQ ID NO: 49934 - RNA, 17 nt, Artificial Sequence
  Synthetic oligonucleotide: TRAC-645
uuucaaagcuuuucucg

SEQ ID NO: 49935 - RNA, 17 nt, Artificial Sequence
  Synthetic oligonucleotide: TRAC-646
acagccgcagcgucaug

SEQ ID NO: 49936 - RNA, 17 nt, Artificial Sequence
  Synthetic oligonucleotide: TRAC-647
aaacuuucaaaaccugu

SEQ ID NO: 49937 - RNA, 17 nt, Artificial Sequence
  Synthetic oligonucleotide: TRAC-648
aagucugucugccuauu

SEQ ID NO: 49938 - RNA, 17 nt, Artificial Sequence
  Synthetic oligonucleotide: TRAC-649
cccugucuuaccuguuu

SEQ ID NO: 49939 - RNA, 20 nt, Artificial Sequence
  Synthetic oligonucleotide: TRAC-650
aaggcguuugcacaugcaaa

SEQ ID NO: 49940 - RNA, 20 nt, Artificial Sequence
  Synthetic oligonucleotide: TRAC-651
ucugucugccuauucaccga

SEQ ID NO: 49941 - RNA, 20 nt, Artificial Sequence
  Synthetic oligonucleotide: TRAC-652
aaacccggccacuuucagga

SEQ ID NO: 49942 - RNA, 20 nt, Artificial Sequence
  Synthetic oligonucleotide: TRAC-653
aauaggcagacagacuuguc

SEQ ID NO: 49943 - RNA, 20 nt, Artificial Sequence
  Synthetic oligonucleotide: TRAC-654
caaacaaaugugucacaaag

SEQ ID NO: 49944 - RNA, 20 nt, Artificial Sequence
  Synthetic oligonucleotide: TRAC-655
ucuuccccagcccagguaag

SEQ ID NO: 49945 - RNA, 20 nt, Artificial Sequence
  Synthetic oligonucleotide: TRAC-656
gugaugucaagcuggucgag

SEQ ID NO: 49946 - RNA, 20 nt, Artificial Sequence
  Synthetic oligonucleotide: TRAC-657
cuguuucaaagcuuuucucg

SEQ ID NO: 49947 - RNA, 20 nt, Artificial Sequence
  Synthetic oligonucleotide: TRAC-658
accacagccgcagcgucaug

SEQ ID NO: 49948 - RNA, 20 nt, Artificial Sequence
  Synthetic oligonucleotide: TRAC-659
gacaagucugucugccuauu

SEQ ID NO: 49949 - RNA, 20 nt, Artificial Sequence
  Synthetic oligonucleotide: TRAC-660
gaccccugucuuaccuguuu

SEQ ID NO: 49950 - RNA, 20 nt, Artificial Sequence
  Synthetic oligonucleotide: TRAC-661
ccuaaacuuucaaaaccugu

SEQ ID NO: 49951 - RNA, 17 nt, Artificial Sequence
  Synthetic oligonucleotide: TRBC-1
cauggccaucagcacga

SEQ ID NO: 49952 - RNA, 17 nt, Artificial Sequence
  Synthetic oligonucleotide: TRBC-2
ggcgggcugcuccuuga

SEQ ID NO: 49953 - RNA, 17 nt, Artificial Sequence
  Synthetic oligonucleotide: TRBC-3
cgaguggacccaggaua

SEQ ID NO: 49954 - RNA, 17 nt, Artificial Sequence
  Synthetic oligonucleotide: TRBC-4
caccuuguaugccgugc

SEQ ID NO: 49955 - RNA, 17 nt, Artificial Sequence
  Synthetic oligonucleotide: TRBC-5
acagcggaagugguugc

SEQ ID NO: 49956 - RNA, 17 nt, Artificial Sequence
  Synthetic oligonucleotide: TRBC-6
ccucggcgcugacgauc

SEQ ID NO: 49957 - RNA, 17 nt, Artificial Sequence
  Synthetic oligonucleotide: TRBC-7
ucaaacacagcgaccuc

SEQ ID NO: 49958 - RNA, 17 nt, Artificial Sequence
  Synthetic oligonucleotide: TRBC-8
guuuuggagcuagccuc

SEQ ID NO: 49959 - RNA, 17 nt, Artificial Sequence
  Synthetic oligonucleotide: TRBC-9
ggacuugacagcggaag

SEQ ID NO: 49960 - RNA, 17 nt, Artificial Sequence
  Synthetic oligonucleotide: TRBC-10
ucucggagaaugacgag

SEQ ID NO: 49961 - RNA, 17 nt, Artificial Sequence
  Synthetic oligonucleotide: TRBC-11
cuucuaccccgaccacg

SEQ ID NO: 49962 - RNA, 17 nt, Artificial Sequence
  Synthetic oligonucleotide: TRBC-12
aaacguguucccacccg

SEQ ID NO: 49963 - RNA, 17 nt, Artificial Sequence
  Synthetic oligonucleotide: TRBC-13
cagcggaagugguugcg

SEQ ID NO: 49964 - RNA, 17 nt, Artificial Sequence
  Synthetic oligonucleotide: TRBC-14
cagcacggcauacaagg

SEQ ID NO: 49965 - RNA, 17 nt, Artificial Sequence
  Synthetic oligonucleotide: TRBC-15
agcggaagugguugcgg

SEQ ID NO: 49966 - RNA, 17 nt, Artificial Sequence
  Synthetic oligonucleotide: TRBC-16
aacacagcgaccucggg

SEQ ID NO: 49967 - RNA, 17 nt, Artificial Sequence
  Synthetic oligonucleotide: TRBC-17
cucaaacacagcgaccu

SEQ ID NO: 49968 - RNA, 17 nt, Artificial Sequence
  Synthetic oligonucleotide: TRBC-18
cucggcgcugacgaucu

SEQ ID NO: 49969 - RNA, 17 nt, Artificial Sequence
  Synthetic oligonucleotide: TRBC-19
acacagcgaccucgggu

SEQ ID NO: 49970 - RNA, 20 nt, Artificial Sequence
  Synthetic oligonucleotide: TRBC-20
acugaccagcacggcauaca

SEQ ID NO: 49971 - RNA, 20 nt, Artificial Sequence
  Synthetic oligonucleotide: TRBC-21
cacgagggcacugaccagca

SEQ ID NO: 49972 - RNA, 20 nt, Artificial Sequence
  Synthetic oligonucleotide: TRBC-22
ucaacagagucuuaccagca

SEQ ID NO: 49973 - RNA, 20 nt, Artificial Sequence
  Synthetic oligonucleotide: TRBC-23
uaccauggccaucagcacga

SEQ ID NO: 49974 - RNA, 20 nt, Artificial Sequence
  Synthetic oligonucleotide: TRBC-24
cugccugagcagccgccuga

SEQ ID NO: 49975 - RNA, 20 nt, Artificial Sequence
  Synthetic oligonucleotide: TRBC-25
ugacgaguggacccaggaua

SEQ ID NO: 49976 - RNA, 20 nt, Artificial Sequence
  Synthetic oligonucleotide: TRBC-26
cgcugucaaguccaguucua

SEQ ID NO: 49977 - RNA, 20 nt, Artificial Sequence
  Synthetic oligonucleotide: TRBC-27
ucgugcugauggccauggua

SEQ ID NO: 49978 - RNA, 20 nt, Artificial Sequence
  Synthetic oligonucleotide: TRBC-28
acacuggugugccuggccac

SEQ ID NO: 49979 - RNA, 20 nt, Artificial Sequence
  Synthetic oligonucleotide: TRBC-29
ggccaccuuguaugccgugc

SEQ ID NO: 49980 - RNA, 20 nt, Artificial Sequence
  Synthetic oligonucleotide: TRBC-30
uugacagcggaagugguugc

SEQ ID NO: 49981 - RNA, 20 nt, Artificial Sequence
  Synthetic oligonucleotide: TRBC-31
aacacguuuuucagguccuc

SEQ ID NO: 49982 - RNA, 20 nt, Artificial Sequence
  Synthetic oligonucleotide: TRBC-32
cgggugggaacacguuuuuc

SEQ ID NO: 49983 - RNA, 20 nt, Artificial Sequence
  Synthetic oligonucleotide: TRBC-33
acuggacuugacagcggaag

SEQ ID NO: 49984 - RNA, 20 nt, Artificial Sequence
  Synthetic oligonucleotide: TRBC-34
cguagaacuggacuugacag

SEQ ID NO: 49985 - RNA, 20 nt, Artificial Sequence
  Synthetic oligonucleotide: TRBC-35
ggcucucggagaaugacgag

SEQ ID NO: 49986 - RNA, 20 nt, Artificial Sequence
  Synthetic oligonucleotide: TRBC-36
agggcgggcugcuccuugag

SEQ ID NO: 49987 - RNA, 20 nt, Artificial Sequence
  Synthetic oligonucleotide: TRBC-37
ucccuagcaagaucucauag

SEQ ID NO: 49988 - RNA, 20 nt, Artificial Sequence
  Synthetic oligonucleotide: TRBC-38
aggcuucuaccccgaccacg

SEQ ID NO: 49989 - RNA, 20 nt, Artificial Sequence
  Synthetic oligonucleotide: TRBC-39
gaaaaacguguucccacccg

SEQ ID NO: 49990 - RNA, 20 nt, Artificial Sequence
  Synthetic oligonucleotide: TRBC-40
cacccagaucgucagcgccg

SEQ ID NO: 49991 - RNA, 20 nt, Artificial Sequence
  Synthetic oligonucleotide: TRBC-41
ugacagcggaagugguugcg

SEQ ID NO: 49992 - RNA, 20 nt, Artificial Sequence
  Synthetic oligonucleotide: TRBC-42
gaccagcacggcauacaagg

SEQ ID NO: 49993 - RNA, 20 nt, Artificial Sequence
  Synthetic oligonucleotide: TRBC-43
gcggggguucugccagaagg

SEQ ID NO: 49994 - RNA, 20 nt, Artificial Sequence
  Synthetic oligonucleotide: TRBC-44
gacagcggaagugguugcgg

SEQ ID NO: 49995 - RNA, 20 nt, Artificial Sequence
  Synthetic oligonucleotide: TRBC-45
ucaaacacagcgaccucggg

SEQ ID NO: 49996 - RNA, 20 nt, Artificial Sequence
  Synthetic oligonucleotide: TRBC-46
guggucgggguagaagccug

SEQ ID NO: 49997 - RNA, 20 nt, Artificial Sequence
  Synthetic oligonucleotide: TRBC-47
aucgucagcgccgaggccug

SEQ ID NO: 49998 - RNA, 20 nt, Artificial Sequence
  Synthetic oligonucleotide: TRBC-48
cuugacagcggaagugguug

SEQ ID NO: 49999 - RNA, 20 nt, Artificial Sequence
  Synthetic oligonucleotide: TRBC-49
augacgaguggacccaggau

SEQ ID NO: 50000 - RNA, 20 nt, Artificial Sequence
  Synthetic oligonucleotide: TRBC-50
ggccucggcgcugacgaucu

SEQ ID NO: 50001 - RNA, 20 nt, Artificial Sequence
  Synthetic oligonucleotide: TRBC-51
aguccaguucuacgggcucu

SEQ ID NO: 50002 - RNA, 20 nt, Artificial Sequence
  Synthetic oligonucleotide: TRBC-52
caaacacagcgaccucgggu

SEQ ID NO: 50003 - RNA, 17 nt, Artificial Sequence
  Synthetic oligonucleotide: TRBC-53
aaacaggggaagaaaaa

SEQ ID NO: 50004 - RNA, 17 nt, Artificial Sequence
  Synthetic oligonucleotide: TRBC-54
gaucucccacacccaaa

SEQ ID NO: 50005 - RNA, 17 nt, Artificial Sequence
  Synthetic oligonucleotide: TRBC-55
uucagguccucuggaaa

SEQ ID NO: 50006 - RNA, 17 nt, Artificial Sequence
  Synthetic oligonucleotide: TRBC-56
cagagucuuaccagcaa

SEQ ID NO: 50007 - RNA, 17 nt, Artificial Sequence
  Synthetic oligonucleotide: TRBC-57
uccacaggucaagagaa

SEQ ID NO: 50008 - RNA, 17 nt, Artificial Sequence
  Synthetic oligonucleotide: TRBC-58
uuucagguccucuggaa

SEQ ID NO: 50009 - RNA, 17 nt, Artificial Sequence
  Synthetic oligonucleotide: TRBC-59
cugagcuggugggugaa

SEQ ID NO: 50010 - RNA, 17 nt, Artificial Sequence
  Synthetic oligonucleotide: TRBC-60
ggaaagggaagagguaa

SEQ ID NO: 50011 - RNA, 17 nt, Artificial Sequence
  Synthetic oligonucleotide: TRBC-61
cagucugaaagaaaaca

SEQ ID NO: 50012 - RNA, 17 nt, Artificial Sequence
  Synthetic oligonucleotide: TRBC-62
gaccagcacggcauaca

SEQ ID NO: 50013 - RNA, 17 nt, Artificial Sequence
  Synthetic oligonucleotide: TRBC-63
cacccuccuccuuacca

SEQ ID NO: 50014 - RNA, 17 nt, Artificial Sequence
  Synthetic oligonucleotide: TRBC-64
ccucgugcugauggcca

SEQ ID NO: 50015 - RNA, 17 nt, Artificial Sequence
  Synthetic oligonucleotide: TRBC-65
gagggcacugaccagca

SEQ ID NO: 50016 - RNA, 17 nt, Artificial Sequence
  Synthetic oligonucleotide: TRBC-66
acagagucuuaccagca

SEQ ID NO: 50017 - RNA, 17 nt, Artificial Sequence
  Synthetic oligonucleotide: TRBC-67
agacccgcagccccuca

SEQ ID NO: 50018 - RNA, 17 nt, Artificial Sequence
  Synthetic oligonucleotide: TRBC-68
aagagagaacauuuuca

SEQ ID NO: 50019 - RNA, 17 nt, Artificial Sequence
  Synthetic oligonucleotide: TRBC-69
gcggggguucugccaga

SEQ ID NO: 50020 - RNA, 17 nt, Artificial Sequence
  Synthetic oligonucleotide: TRBC-70
caagaucucauagagga

SEQ ID NO: 50021 - RNA, 17 nt, Artificial Sequence
  Synthetic oligonucleotide: TRBC-71
ggccaugguaaggagga

SEQ ID NO: 50022 - RNA, 17 nt, Artificial Sequence
  Synthetic oligonucleotide: TRBC-72
ugagaucuugcuaggga

SEQ ID NO: 50023 - RNA, 17 nt, Artificial Sequence
  Synthetic oligonucleotide: TRBC-73
cuggugggugaauggga

SEQ ID NO: 50024 - RNA, 17 nt, Artificial Sequence
  Synthetic oligonucleotide: TRBC-74
ugaagaaugaccuggga

SEQ ID NO: 50025 - RNA, 17 nt, Artificial Sequence
  Synthetic oligonucleotide: TRBC-75
ccugagcagccgccuga

SEQ ID NO: 50026 - RNA, 17 nt, Artificial Sequence
  Synthetic oligonucleotide: TRBC-76
cagugcccucgugcuga

SEQ ID NO: 50027 - RNA, 17 nt, Artificial Sequence
  Synthetic oligonucleotide: TRBC-77
gagaucucugcuucuga

SEQ ID NO: 50028 - RNA, 17 nt, Artificial Sequence
  Synthetic oligonucleotide: TRBC-78
guaucuggagucauuga

SEQ ID NO: 50029 - RNA, 17 nt, Artificial Sequence
  Synthetic oligonucleotide: TRBC-79
aggaggagggugggaua

SEQ ID NO: 50030 - RNA, 17 nt, Artificial Sequence
  Synthetic oligonucleotide: TRBC-80
aagagguaauggggcua

SEQ ID NO: 50031 - RNA, 17 nt, Artificial Sequence
  Synthetic oligonucleotide: TRBC-81
ucuaugagaucuugcua

SEQ ID NO: 50032 - RNA, 17 nt, Artificial Sequence
  Synthetic oligonucleotide: TRBC-82
ugucaaguccaguucua

SEQ ID NO: 50033 - RNA, 17 nt, Artificial Sequence
  Synthetic oligonucleotide: TRBC-83
ugcugauggccauggua

SEQ ID NO: 50034 - RNA, 17 nt, Artificial Sequence
  Synthetic oligonucleotide: TRBC-84
acagucugaaagaaaac

SEQ ID NO: 50035 - RNA, 17 nt, Artificial Sequence
  Synthetic oligonucleotide: TRBC-85
ccgagagcccguagaac

SEQ ID NO: 50036 - RNA, 17 nt, Artificial Sequence
  Synthetic oligonucleotide: TRBC-86
cacccaaaaggccacac

SEQ ID NO: 50037 - RNA, 17 nt, Artificial Sequence
  Synthetic oligonucleotide: TRBC-87
cuggugugccuggccac

SEQ ID NO: 50038 - RNA, 17 nt, Artificial Sequence
  Synthetic oligonucleotide: TRBC-88
aauguucucucuuccac

SEQ ID NO: 50039 - RNA, 17 nt, Artificial Sequence
  Synthetic oligonucleotide: TRBC-89
agaggaugguggcagac

SEQ ID NO: 50040 - RNA, 17 nt, Artificial Sequence
  Synthetic oligonucleotide: TRBC-90
cugacgaucugggugac

SEQ ID NO: 50041 - RNA, 17 nt, Artificial Sequence
  Synthetic oligonucleotide: TRBC-91
gucaaguccaguucuac

SEQ ID NO: 50042 - RNA, 17 nt, Artificial Sequence
  Synthetic oligonucleotide: TRBC-92
aggagagacucacuuac

SEQ ID NO: 50043 - RNA, 17 nt, Artificial Sequence
  Synthetic oligonucleotide: TRBC-93
gaaugacgaguggaccc

SEQ ID NO: 50044 - RNA, 17 nt, Artificial Sequence
  Synthetic oligonucleotide: TRBC-94
cucaccugcucuacccc

SEQ ID NO: 50045 - RNA, 17 nt, Artificial Sequence
  Synthetic oligonucleotide: TRBC-95
ccuccaggcaucucccc

SEQ ID NO: 50046 - RNA, 17 nt, Artificial Sequence
  Synthetic oligonucleotide: TRBC-96
agcuccaaaaccauccc

SEQ ID NO: 50047 - RNA, 17 nt, Artificial Sequence
  Synthetic oligonucleotide: TRBC-97
ucgucagcgccgaggcc

SEQ ID NO: 50048 - RNA, 17 nt, Artificial Sequence
  Synthetic oligonucleotide: TRBC-98
agcaggugaguggggcc

SEQ ID NO: 50049 - RNA, 17 nt, Artificial Sequence
  Synthetic oligonucleotide: TRBC-99
gguagaagccuguggcc

SEQ ID NO: 50050 - RNA, 17 nt, Artificial Sequence
  Synthetic oligonucleotide: TRBC-100
gggccuggggagaugcc

SEQ ID NO: 50051 - RNA, 17 nt, Artificial Sequence
  Synthetic oligonucleotide: TRBC-101
ggccacacuggugugcc

SEQ ID NO: 50052 - RNA, 17 nt, Artificial Sequence
  Synthetic oligonucleotide: TRBC-102
cagguuuggcccuaucc

SEQ ID NO: 50053 - RNA, 17 nt, Artificial Sequence
  Synthetic oligonucleotide: TRBC-103
gaggccugggguagagc

SEQ ID NO: 50054 - RNA, 17 nt, Artificial Sequence
  Synthetic oligonucleotide: TRBC-104
accacguggagcugagc

SEQ ID NO: 50055 - RNA, 17 nt, Artificial Sequence
  Synthetic oligonucleotide: TRBC-105
cuggagucauugagggc

SEQ ID NO: 50056 - RNA, 17 nt, Artificial Sequence
  Synthetic oligonucleotide: TRBC-106
gcuccuugaggggcugc

SEQ ID NO: 50057 - RNA, 17 nt, Artificial Sequence
  Synthetic oligonucleotide: TRBC-107
cagacaggaccccuugc

SEQ ID NO: 50058 - RNA, 17 nt, Artificial Sequence
  Synthetic oligonucleotide: TRBC-108
gcugcucaggcaguauc

SEQ ID NO: 50059 - RNA, 17 nt, Artificial Sequence
  Synthetic oligonucleotide: TRBC-109
gacuguggcuucaccuc

SEQ ID NO: 50060 - RNA, 17 nt, Artificial Sequence
  Synthetic oligonucleotide: TRBC-110
agguggccgagacccuc

SEQ ID NO: 50061 - RNA, 17 nt, Artificial Sequence
  Synthetic oligonucleotide: TRBC-111
acguuuuucagguccuc

SEQ ID NO: 50062 - RNA, 17 nt, Artificial Sequence
  Synthetic oligonucleotide: TRBC-112
cccucaggcggcugcuc

SEQ ID NO: 50063 - RNA, 17 nt, Artificial Sequence
  Synthetic oligonucleotide: TRBC-113
cucagcuccacgugguc

SEQ ID NO: 50064 - RNA, 17 nt, Artificial Sequence
  Synthetic oligonucleotide: TRBC-114
gggucucggccaccuuc

SEQ ID NO: 50065 - RNA, 17 nt, Artificial Sequence
  Synthetic oligonucleotide: TRBC-115
gaagagagaacauuuuc

SEQ ID NO: 50066 - RNA, 17 nt, Artificial Sequence
  Synthetic oligonucleotide: TRBC-116
gugggaacacguuuuuc

SEQ ID NO: 50067 - RNA, 17 nt, Artificial Sequence
  Synthetic oligonucleotide: TRBC-117
agagucuuaccagcaag

SEQ ID NO: 50068 - RNA, 17 nt, Artificial Sequence
  Synthetic oligonucleotide: TRBC-118
uccucuggaaagggaag

SEQ ID NO: 50069 - RNA, 17 nt, Artificial Sequence
  Synthetic oligonucleotide: TRBC-119
agucugaaagaaaacag

SEQ ID NO: 50070 - RNA, 17 nt, Artificial Sequence
  Synthetic oligonucleotide: TRBC-120
gggaaggaggugcacag

SEQ ID NO: 50071 - RNA, 17 nt, Artificial Sequence
  Synthetic oligonucleotide: TRBC-121
agaacuggacuugacag

SEQ ID NO: 50072 - RNA, 17 nt, Artificial Sequence
  Synthetic oligonucleotide: TRBC-122
aagagaaaggauuccag

SEQ ID NO: 50073 - RNA, 17 nt, Artificial Sequence
  Synthetic oligonucleotide: TRBC-123
accucuucccuuuccag

SEQ ID NO: 50074 - RNA, 17 nt, Artificial Sequence
  Synthetic oligonucleotide: TRBC-124
gggguagagcaggugag

SEQ ID NO: 50075 - RNA, 17 nt, Artificial Sequence
  Synthetic oligonucleotide: TRBC-125
gcgggcugcuccuugag

SEQ ID NO: 50076 - RNA, 17 nt, Artificial Sequence
  Synthetic oligonucleotide: TRBC-126
cuagcaagaucucauag

SEQ ID NO: 50077 - RNA, 17 nt, Artificial Sequence
  Synthetic oligonucleotide: TRBC-127
accagcucagcuccacg

SEQ ID NO: 50078 - RNA, 17 nt, Artificial Sequence
  Synthetic oligonucleotide: TRBC-128
ccauggccaucagcacg

SEQ ID NO: 50079 - RNA, 17 nt, Artificial Sequence
  Synthetic oligonucleotide: TRBC-129
ccagaucgucagcgccg

SEQ ID NO: 50080 - RNA, 17 nt, Artificial Sequence
  Synthetic oligonucleotide: TRBC-130
ucagcuccacguggucg

SEQ ID NO: 50081 - RNA, 17 nt, Artificial Sequence
  Synthetic oligonucleotide: TRBC-131
gggguucugccagaagg

SEQ ID NO: 50082 - RNA, 17 nt, Artificial Sequence
  Synthetic oligonucleotide: TRBC-132
gugggugaaugggaagg

SEQ ID NO: 50083 - RNA, 17 nt, Artificial Sequence
  Synthetic oligonucleotide: TRBC-133
ugauggccaugguaagg

SEQ ID NO: 50084 - RNA, 17 nt, Artificial Sequence
  Synthetic oligonucleotide: TRBC-134
uggccgagacccucagg

SEQ ID NO: 50085 - RNA, 17 nt, Artificial Sequence
  Synthetic oligonucleotide: TRBC-135
uggccaugguaaggagg

SEQ ID NO: 50086 - RNA, 17 nt, Artificial Sequence
  Synthetic oligonucleotide: TRBC-136
agagacucacuuaccgg

SEQ ID NO: 50087 - RNA, 17 nt, Artificial Sequence
  Synthetic oligonucleotide: TRBC-137
caugguaaggaggaggg

SEQ ID NO: 50088 - RNA, 17 nt, Artificial Sequence
  Synthetic oligonucleotide: TRBC-138
ucuggagucauugaggg

SEQ ID NO: 50089 - RNA, 17 nt, Artificial Sequence
  Synthetic oligonucleotide: TRBC-139
gaucucauagaggaugg

SEQ ID NO: 50090 - RNA, 17 nt, Artificial Sequence
  Synthetic oligonucleotide: TRBC-140
ccuggggagaugccugg

SEQ ID NO: 50091 - RNA, 17 nt, Artificial Sequence
  Synthetic oligonucleotide: TRBC-141
acguggagcugagcugg

SEQ ID NO: 50092 - RNA, 17 nt, Artificial Sequence
  Synthetic oligonucleotide: TRBC-142
aaagggaagagguaaug

SEQ ID NO: 50093 - RNA, 17 nt, Artificial Sequence
  Synthetic oligonucleotide: TRBC-143
uguuuucuuucagacug

SEQ ID NO: 50094 - RNA, 17 nt, Artificial Sequence
  Synthetic oligonucleotide: TRBC-144
uccuuucucuugaccug

SEQ ID NO: 50095 - RNA, 17 nt, Artificial Sequence
  Synthetic oligonucleotide: TRBC-145
gucgggguagaagccug

SEQ ID NO: 50096 - RNA, 17 nt, Artificial Sequence
  Synthetic oligonucleotide: TRBC-146
gccugagcagccgccug

SEQ ID NO: 50097 - RNA, 17 nt, Artificial Sequence
  Synthetic oligonucleotide: TRBC-147
gucagcgccgaggccug

SEQ ID NO: 50098 - RNA, 17 nt, Artificial Sequence
  Synthetic oligonucleotide: TRBC-148
caggugaguggggccug

SEQ ID NO: 50099 - RNA, 17 nt, Artificial Sequence
  Synthetic oligonucleotide: TRBC-149
ugcuccuugaggggcug

SEQ ID NO: 50100 - RNA, 17 nt, Artificial Sequence
  Synthetic oligonucleotide: TRBC-150
gaaggaggugcacagug

SEQ ID NO: 50101 - RNA, 17 nt, Artificial Sequence
  Synthetic oligonucleotide: TRBC-151
ggccaggcacaccagug

SEQ ID NO: 50102 - RNA, 17 nt, Artificial Sequence
  Synthetic oligonucleotide: TRBC-152
gguagagcaggugagug

SEQ ID NO: 50103 - RNA, 17 nt, Artificial Sequence
  Synthetic oligonucleotide: TRBC-153
guguggccuuuugggug

SEQ ID NO: 50104 - RNA, 17 nt, Artificial Sequence
  Synthetic oligonucleotide: TRBC-154
aguaucuggagucauug

SEQ ID NO: 50105 - RNA, 17 nt, Artificial Sequence
  Synthetic oligonucleotide: TRBC-155
gggcgggcugcuccuug

SEQ ID NO: 50106 - RNA, 17 nt, Artificial Sequence
  Synthetic oligonucleotide: TRBC-156
gacagcggaagugguug

SEQ ID NO: 50107 - RNA, 17 nt, Artificial Sequence
  Synthetic oligonucleotide: TRBC-157
ugagcuggugggugaau

SEQ ID NO: 50108 - RNA, 17 nt, Artificial Sequence
  Synthetic oligonucleotide: TRBC-158
gaaagggaagagguaau

SEQ ID NO: 50109 - RNA, 17 nt, Artificial Sequence
  Synthetic oligonucleotide: TRBC-159
acgaguggacccaggau

SEQ ID NO: 50110 - RNA, 17 nt, Artificial Sequence
  Synthetic oligonucleotide: TRBC-160
aaggaggagggugggau

SEQ ID NO: 50111 - RNA, 17 nt, Artificial Sequence
  Synthetic oligonucleotide: TRBC-161
ugcucuaccccaggccu

SEQ ID NO: 50112 - RNA, 17 nt, Artificial Sequence
  Synthetic oligonucleotide: TRBC-162
cgucagcgccgaggccu

SEQ ID NO: 50113 - RNA, 17 nt, Artificial Sequence
  Synthetic oligonucleotide: TRBC-163
gcaggugaguggggccu

SEQ ID NO: 50114 - RNA, 17 nt, Artificial Sequence
  Synthetic oligonucleotide: TRBC-164
agguuuggcccuauccu

SEQ ID NO: 50115 - RNA, 17 nt, Artificial Sequence
  Synthetic oligonucleotide: TRBC-165
gaagagguaauggggcu

SEQ ID NO: 50116 - RNA, 17 nt, Artificial Sequence
  Synthetic oligonucleotide: TRBC-166
cucuaugagaucuugcu

SEQ ID NO: 50117 - RNA, 17 nt, Artificial Sequence
  Synthetic oligonucleotide: TRBC-167
ccaguucuacgggcucu

SEQ ID NO: 50118 - RNA, 17 nt, Artificial Sequence
  Synthetic oligonucleotide: TRBC-168
cagccgccugagggucu

SEQ ID NO: 50119 - RNA, 17 nt, Artificial Sequence
  Synthetic oligonucleotide: TRBC-169
ggaaggaggugcacagu

SEQ ID NO: 50120 - RNA, 17 nt, Artificial Sequence
  Synthetic oligonucleotide: TRBC-170
ggguagagcaggugagu

SEQ ID NO: 50121 - RNA, 17 nt, Artificial Sequence
  Synthetic oligonucleotide: TRBC-171
augguaaggaggagggu

SEQ ID NO: 50122 - RNA, 17 nt, Artificial Sequence
  Synthetic oligonucleotide: TRBC-172
cguggagcugagcuggu

SEQ ID NO: 50123 - RNA, 17 nt, Artificial Sequence
  Synthetic oligonucleotide: TRBC-173
gcucagcuccacguggu

SEQ ID NO: 50124 - RNA, 17 nt, Artificial Sequence
  Synthetic oligonucleotide: TRBC-174
acaagaacagagcaugu

SEQ ID NO: 50125 - RNA, 17 nt, Artificial Sequence
  Synthetic oligonucleotide: TRBC-175
uguggccuuuugggugu

SEQ ID NO: 50126 - RNA, 17 nt, Artificial Sequence
  Synthetic oligonucleotide: TRBC-176
gaucugggugacagguu

SEQ ID NO: 50127 - RNA, 17 nt, Artificial Sequence
  Synthetic oligonucleotide: TRBC-177
acaccaguguggccuuu

SEQ ID NO: 50128 - RNA, 17 nt, Artificial Sequence
  Synthetic oligonucleotide: TRBC-178
augaccugggaugguuu

SEQ ID NO: 50129 - RNA, 17 nt, Artificial Sequence
  Synthetic oligonucleotide: TRBC-179
caccaguguggccuuuu

SEQ ID NO: 50130 - RNA, 20 nt, Artificial Sequence
  Synthetic oligonucleotide: TRBC-180
agaaaacaggggaagaaaaa

SEQ ID NO: 50131 - RNA, 20 nt, Artificial Sequence
  Synthetic oligonucleotide: TRBC-181
agagaucucccacacccaaa

SEQ ID NO: 50132 - RNA, 20 nt, Artificial Sequence
  Synthetic oligonucleotide: TRBC-182
uuuuucagguccucuggaaa

SEQ ID NO: 50133 - RNA, 20 nt, Artificial Sequence
  Synthetic oligonucleotide: TRBC-183
caacagagucuuaccagcaa

SEQ ID NO: 50134 - RNA, 20 nt, Artificial Sequence
  Synthetic oligonucleotide: TRBC-184
ucuuccacaggucaagagaa

SEQ ID NO: 50135 - RNA, 20 nt, Artificial Sequence
  Synthetic oligonucleotide: TRBC-185
guuuuucagguccucuggaa

SEQ ID NO: 50136 - RNA, 20 nt, Artificial Sequence
  Synthetic oligonucleotide: TRBC-186
gagcugagcuggugggugaa

SEQ ID NO: 50137 - RNA, 20 nt, Artificial Sequence
  Synthetic oligonucleotide: TRBC-187
ucuggaaagggaagagguaa

SEQ ID NO: 50138 - RNA, 20 nt, Artificial Sequence
  Synthetic oligonucleotide: TRBC-188
ccacagucugaaagaaaaca

SEQ ID NO: 50139 - RNA, 20 nt, Artificial Sequence
  Synthetic oligonucleotide: TRBC-189
ucccacccuccuccuuacca

SEQ ID NO: 50140 - RNA, 20 nt, Artificial Sequence
  Synthetic oligonucleotide: TRBC-190
ugcccucgugcugauggcca

SEQ ID NO: 50141 - RNA, 20 nt, Artificial Sequence
  Synthetic oligonucleotide: TRBC-191
cacagacccgcagccccuca

SEQ ID NO: 50142 - RNA, 20 nt, Artificial Sequence
  Synthetic oligonucleotide: TRBC-192
uggaagagagaacauuuuca

SEQ ID NO: 50143 - RNA, 20 nt, Artificial Sequence
  Synthetic oligonucleotide: TRBC-193
guugcggggguucugccaga

SEQ ID NO: 50144 - RNA, 20 nt, Artificial Sequence
  Synthetic oligonucleotide: TRBC-194
uagcaagaucucauagagga

SEQ ID NO: 50145 - RNA, 20 nt, Artificial Sequence
  Synthetic oligonucleotide: TRBC-195
gauggccaugguaaggagga

SEQ ID NO: 50146 - RNA, 20 nt, Artificial Sequence
  Synthetic oligonucleotide: TRBC-196
cuaugagaucuugcuaggga

SEQ ID NO: 50147 - RNA, 20 nt, Artificial Sequence
  Synthetic oligonucleotide: TRBC-197
gagcuggugggugaauggga

SEQ ID NO: 50148 - RNA, 20 nt, Artificial Sequence
  Synthetic oligonucleotide: TRBC-198
ggucagugcccucgugcuga

SEQ ID NO: 50149 - RNA, 20 nt, Artificial Sequence
  Synthetic oligonucleotide: TRBC-199
ugggagaucucugcuucuga

SEQ ID NO: 50150 - RNA, 20 nt, Artificial Sequence
  Synthetic oligonucleotide: TRBC-200
gcaguaucuggagucauuga

SEQ ID NO: 50151 - RNA, 20 nt, Artificial Sequence
  Synthetic oligonucleotide: TRBC-201
gagggcgggcugcuccuuga

SEQ ID NO: 50152 - RNA, 20 nt, Artificial Sequence
  Synthetic oligonucleotide: TRBC-202
guaaggaggagggugggaua

SEQ ID NO: 50153 - RNA, 20 nt, Artificial Sequence
  Synthetic oligonucleotide: TRBC-203
gggaagagguaauggggcua

SEQ ID NO: 50154 - RNA, 20 nt, Artificial Sequence
  Synthetic oligonucleotide: TRBC-204
uccucuaugagaucuugcua

SEQ ID NO: 50155 - RNA, 20 nt, Artificial Sequence
  Synthetic oligonucleotide: TRBC-205
gccacagucugaaagaaaac

SEQ ID NO: 50156 - RNA, 20 nt, Artificial Sequence
  Synthetic oligonucleotide: TRBC-206
ucuccgagagcccguagaac

SEQ ID NO: 50157 - RNA, 20 nt, Artificial Sequence
  Synthetic oligonucleotide: TRBC-207
ccacacccaaaaggccacac

SEQ ID NO: 50158 - RNA, 20 nt, Artificial Sequence
  Synthetic oligonucleotide: TRBC-208
gaaaauguucucucuuccac

SEQ ID NO: 50159 - RNA, 20 nt, Artificial Sequence
  Synthetic oligonucleotide: TRBC-209
cauagaggaugguggcagac

SEQ ID NO: 50160 - RNA, 20 nt, Artificial Sequence
  Synthetic oligonucleotide: TRBC-210
gcgcugacgaucugggugac

SEQ ID NO: 50161 - RNA, 20 nt, Artificial Sequence
  Synthetic oligonucleotide: TRBC-211
gcugucaaguccaguucuac

SEQ ID NO: 50162 - RNA, 20 nt, Artificial Sequence
  Synthetic oligonucleotide: TRBC-212
aaaaggagagacucacuuac

SEQ ID NO: 50163 - RNA, 20 nt, Artificial Sequence
  Synthetic oligonucleotide: TRBC-213
ggagaaugacgaguggaccc

SEQ ID NO: 50164 - RNA, 20 nt, Artificial Sequence
  Synthetic oligonucleotide: TRBC-214
ccacucaccugcucuacccc

SEQ ID NO: 50165 - RNA, 20 nt, Artificial Sequence
  Synthetic oligonucleotide: TRBC-215
gcuagcuccaaaaccauccc

SEQ ID NO: 50166 - RNA, 20 nt, Artificial Sequence
  Synthetic oligonucleotide: TRBC-216
agaucgucagcgccgaggcc

SEQ ID NO: 50167 - RNA, 20 nt, Artificial Sequence
  Synthetic oligonucleotide: TRBC-217
uagagcaggugaguggggcc

SEQ ID NO: 50168 - RNA, 20 nt, Artificial Sequence
  Synthetic oligonucleotide: TRBC-218
cgggguagaagccuguggcc

SEQ ID NO: 50169 - RNA, 20 nt, Artificial Sequence
  Synthetic oligonucleotide: TRBC-219
guggggccuggggagaugcc

SEQ ID NO: 50170 - RNA, 20 nt, Artificial Sequence
  Synthetic oligonucleotide: TRBC-220
aaaggccacacuggugugcc

SEQ ID NO: 50171 - RNA, 20 nt, Artificial Sequence
  Synthetic oligonucleotide: TRBC-221
ugacagguuuggcccuaucc

SEQ ID NO: 50172 - RNA, 20 nt, Artificial Sequence
  Synthetic oligonucleotide: TRBC-222
gccgaggccugggguagagc

SEQ ID NO: 50173 - RNA, 20 nt, Artificial Sequence
  Synthetic oligonucleotide: TRBC-223
ccgaccacguggagcugagc

SEQ ID NO: 50174 - RNA, 20 nt, Artificial Sequence
  Synthetic oligonucleotide: TRBC-224
uaucuggagucauugagggc

SEQ ID NO: 50175 - RNA, 20 nt, Artificial Sequence
  Synthetic oligonucleotide: TRBC-225
gcugcuccuugaggggcugc

SEQ ID NO: 50176 - RNA, 20 nt, Artificial Sequence
  Synthetic oligonucleotide: TRBC-226
uggcagacaggaccccuugc

SEQ ID NO: 50177 - RNA, 20 nt, Artificial Sequence
  Synthetic oligonucleotide: TRBC-227
aggccucggcgcugacgauc

SEQ ID NO: 50178 - RNA, 20 nt, Artificial Sequence
  Synthetic oligonucleotide: TRBC-228
gcggcugcucaggcaguauc

SEQ ID NO: 50179 - RNA, 20 nt, Artificial Sequence
  Synthetic oligonucleotide: TRBC-229
ucagacuguggcuucaccuc

SEQ ID NO: 50180 - RNA, 20 nt, Artificial Sequence
  Synthetic oligonucleotide: TRBC-230
ggcucaaacacagcgaccuc

SEQ ID NO: 50181 - RNA, 20 nt, Artificial Sequence
  Synthetic oligonucleotide: TRBC-231
agaagguggccgagacccuc

SEQ ID NO: 50182 - RNA, 20 nt, Artificial Sequence
  Synthetic oligonucleotide: TRBC-232
augguuuuggagcuagccuc

SEQ ID NO: 50183 - RNA, 20 nt, Artificial Sequence
  Synthetic oligonucleotide: TRBC-233
agacccucaggcggcugcuc

SEQ ID NO: 50184 - RNA, 20 nt, Artificial Sequence
  Synthetic oligonucleotide: TRBC-234
cagcucagcuccacgugguc

SEQ ID NO: 50185 - RNA, 20 nt, Artificial Sequence
  Synthetic oligonucleotide: TRBC-235
ugagggucucggccaccuuc

SEQ ID NO: 50186 - RNA, 20 nt, Artificial Sequence
  Synthetic oligonucleotide: TRBC-236
guggaagagagaacauuuuc

SEQ ID NO: 50187 - RNA, 20 nt, Artificial Sequence
  Synthetic oligonucleotide: TRBC-237
aacagagucuuaccagcaag

SEQ ID NO: 50188 - RNA, 20 nt, Artificial Sequence
  Synthetic oligonucleotide: TRBC-238
agguccucuggaaagggaag

SEQ ID NO: 50189 - RNA, 20 nt, Artificial Sequence
  Synthetic oligonucleotide: TRBC-239
cacagucugaaagaaaacag

SEQ ID NO: 50190 - RNA, 20 nt, Artificial Sequence
  Synthetic oligonucleotide: TRBC-240
aaugggaaggaggugcacag

SEQ ID NO: 50191 - RNA, 20 nt, Artificial Sequence
  Synthetic oligonucleotide: TRBC-241
gucaagagaaaggauuccag

SEQ ID NO: 50192 - RNA, 20 nt, Artificial Sequence
  Synthetic oligonucleotide: TRBC-242
auuaccucuucccuuuccag

SEQ ID NO: 50193 - RNA, 20 nt, Artificial Sequence
  Synthetic oligonucleotide: TRBC-243
ccugggguagagcaggugag

SEQ ID NO: 50194 - RNA, 20 nt, Artificial Sequence
  Synthetic oligonucleotide: TRBC-244
cccaccagcucagcuccacg

SEQ ID NO: 50195 - RNA, 20 nt, Artificial Sequence
  Synthetic oligonucleotide: TRBC-245
uuaccauggccaucagcacg

SEQ ID NO: 50196 - RNA, 20 nt, Artificial Sequence
  Synthetic oligonucleotide: TRBC-246
agcucagcuccacguggucg

SEQ ID NO: 50197 - RNA, 20 nt, Artificial Sequence
  Synthetic oligonucleotide: TRBC-247
cuggugggugaaugggaagg

SEQ ID NO: 50198 - RNA, 20 nt, Artificial Sequence
  Synthetic oligonucleotide: TRBC-248
ugcugauggccaugguaagg

SEQ ID NO: 50199 - RNA, 20 nt, Artificial Sequence
  Synthetic oligonucleotide: TRBC-249
agguggccgagacccucagg

SEQ ID NO: 50200 - RNA, 20 nt, Artificial Sequence
  Synthetic oligonucleotide: TRBC-250
ugauggccaugguaaggagg

SEQ ID NO: 50201 - RNA, 20 nt, Artificial Sequence
  Synthetic oligonucleotide: TRBC-251
aggagagacucacuuaccgg

SEQ ID NO: 50202 - RNA, 20 nt, Artificial Sequence
  Synthetic oligonucleotide: TRBC-252
ggccaugguaaggaggaggg

SEQ ID NO: 50203 - RNA, 20 nt, Artificial Sequence
  Synthetic oligonucleotide: TRBC-253
guaucuggagucauugaggg

SEQ ID NO: 50204 - RNA, 20 nt, Artificial Sequence
  Synthetic oligonucleotide: TRBC-254
caagaucucauagaggaugg

SEQ ID NO: 50205 - RNA, 20 nt, Artificial Sequence
  Synthetic oligonucleotide: TRBC-255
gggccuggggagaugccugg

SEQ ID NO: 50206 - RNA, 20 nt, Artificial Sequence
  Synthetic oligonucleotide: TRBC-256
accacguggagcugagcugg

SEQ ID NO: 50207 - RNA, 20 nt, Artificial Sequence
  Synthetic oligonucleotide: TRBC-257
uggaaagggaagagguaaug

SEQ ID NO: 50208 - RNA, 20 nt, Artificial Sequence
  Synthetic oligonucleotide: TRBC-258
cccuguuuucuuucagacug

SEQ ID NO: 50209 - RNA, 20 nt, Artificial Sequence
  Synthetic oligonucleotide: TRBC-259
gaauccuuucucuugaccug

SEQ ID NO: 50210 - RNA, 20 nt, Artificial Sequence
  Synthetic oligonucleotide: TRBC-260
acugccugagcagccgccug

SEQ ID NO: 50211 - RNA, 20 nt, Artificial Sequence
  Synthetic oligonucleotide: TRBC-261
gagcaggugaguggggccug

SEQ ID NO: 50212 - RNA, 20 nt, Artificial Sequence
  Synthetic oligonucleotide: TRBC-262
ggcugcuccuugaggggcug

SEQ ID NO: 50213 - RNA, 20 nt, Artificial Sequence
  Synthetic oligonucleotide: TRBC-263
ugggaaggaggugcacagug

SEQ ID NO: 50214 - RNA, 20 nt, Artificial Sequence
  Synthetic oligonucleotide: TRBC-264
uguggccaggcacaccagug

SEQ ID NO: 50215 - RNA, 20 nt, Artificial Sequence
  Synthetic oligonucleotide: TRBC-265
ugggguagagcaggugagug

SEQ ID NO: 50216 - RNA, 20 nt, Artificial Sequence
  Synthetic oligonucleotide: TRBC-266
ccaguguggccuuuugggug

SEQ ID NO: 50217 - RNA, 20 nt, Artificial Sequence
  Synthetic oligonucleotide: TRBC-267
ggcaguaucuggagucauug

SEQ ID NO: 50218 - RNA, 20 nt, Artificial Sequence
  Synthetic oligonucleotide: TRBC-268
ugagggcgggcugcuccuug

SEQ ID NO: 50219 - RNA, 20 nt, Artificial Sequence
  Synthetic oligonucleotide: TRBC-269
agcugagcuggugggugaau

SEQ ID NO: 50220 - RNA, 20 nt, Artificial Sequence
  Synthetic oligonucleotide: TRBC-270
cuggaaagggaagagguaau

SEQ ID NO: 50221 - RNA, 20 nt, Artificial Sequence
  Synthetic oligonucleotide: TRBC-271
gguaaggaggagggugggau

SEQ ID NO: 50222 - RNA, 20 nt, Artificial Sequence
  Synthetic oligonucleotide: TRBC-272
uggcucaaacacagcgaccu

SEQ ID NO: 50223 - RNA, 20 nt, Artificial Sequence
  Synthetic oligonucleotide: TRBC-273
accugcucuaccccaggccu

SEQ ID NO: 50224 - RNA, 20 nt, Artificial Sequence
  Synthetic oligonucleotide: TRBC-274
gaucgucagcgccgaggccu

SEQ ID NO: 50225 - RNA, 20 nt, Artificial Sequence
  Synthetic oligonucleotide: TRBC-275
agagcaggugaguggggccu

SEQ ID NO: 50226 - RNA, 20 nt, Artificial Sequence
  Synthetic oligonucleotide: TRBC-276
gacagguuuggcccuauccu

SEQ ID NO: 50227 - RNA, 20 nt, Artificial Sequence
  Synthetic oligonucleotide: TRBC-277
agggaagagguaauggggcu

SEQ ID NO: 50228 - RNA, 20 nt, Artificial Sequence
  Synthetic oligonucleotide: TRBC-278
auccucuaugagaucuugcu

SEQ ID NO: 50229 - RNA, 20 nt, Artificial Sequence
  Synthetic oligonucleotide: TRBC-279
gagcagccgccugagggucu

SEQ ID NO: 50230 - RNA, 20 nt, Artificial Sequence
  Synthetic oligonucleotide: TRBC-280
augggaaggaggugcacagu

SEQ ID NO: 50231 - RNA, 20 nt, Artificial Sequence
  Synthetic oligonucleotide: TRBC-281
cugggguagagcaggugagu

SEQ ID NO: 50232 - RNA, 20 nt, Artificial Sequence
  Synthetic oligonucleotide: TRBC-282
gccaugguaaggaggagggu

SEQ ID NO: 50233 - RNA, 20 nt, Artificial Sequence
  Synthetic oligonucleotide: TRBC-283
ccacguggagcugagcuggu

SEQ ID NO: 50234 - RNA, 20 nt, Artificial Sequence
  Synthetic oligonucleotide: TRBC-284
ccagcucagcuccacguggu

SEQ ID NO: 50235 - RNA, 20 nt, Artificial Sequence
  Synthetic oligonucleotide: TRBC-285
uugacaagaacagagcaugu

SEQ ID NO: 50236 - RNA, 20 nt, Artificial Sequence
  Synthetic oligonucleotide: TRBC-286
caguguggccuuuugggugu

SEQ ID NO: 50237 - RNA, 20 nt, Artificial Sequence
  Synthetic oligonucleotide: TRBC-287
gacgaucugggugacagguu

SEQ ID NO: 50238 - RNA, 20 nt, Artificial Sequence
  Synthetic oligonucleotide: TRBC-288
ggcacaccaguguggccuuu

SEQ ID NO: 50239 - RNA, 20 nt, Artificial Sequence
  Synthetic oligonucleotide: TRBC-289
agaaugaccugggaugguuu

SEQ ID NO: 50240 - RNA, 20 nt, Artificial Sequence
  Synthetic oligonucleotide: TRBC-290
gcacaccaguguggccuuuu

SEQ ID NO: 50241 - RNA, 21 nt, Artificial Sequence
  Synthetic oligonucleotide: TRBC-291
cuucccuagcaagaucucaua

SEQ ID NO: 50242 - RNA, 22 nt, Artificial Sequence
  Synthetic oligonucleotide: TRBC-292
ccuucccuagcaagaucucaua

SEQ ID NO: 50243 - RNA, 23 nt, Artificial Sequence
  Synthetic oligonucleotide: TRBC-293
gccuucccuagcaagaucucaua

SEQ ID NO: 50244 - RNA, 24 nt, Artificial Sequence
  Synthetic oligonucleotide: TRBC-294
ggccuucccuagcaagaucucaua

SEQ ID NO: 50245 - RNA, 18 nt, Artificial Sequence
  Synthetic oligonucleotide: TRBC-295
ggcucaaacacagcgacc

SEQ ID NO: 50246 - RNA, 19 nt, Artificial Sequence
  Synthetic oligonucleotide: TRBC-296
uggcucaaacacagcgacc

SEQ ID NO: 50247 - RNA, 20 nt, Artificial Sequence
  Synthetic oligonucleotide: TRBC-297
auggcucaaacacagcgacc

SEQ ID NO: 50248 - RNA, 21 nt, Artificial Sequence
  Synthetic oligonucleotide: TRBC-298
gauggcucaaacacagcgacc

SEQ ID NO: 50249 - RNA, 22 nt, Artificial Sequence
  Synthetic oligonucleotide: TRBC-299
ugauggcucaaacacagcgacc

SEQ ID NO: 50250 - RNA, 23 nt, Artificial Sequence
  Synthetic oligonucleotide: TRBC-300
cugauggcucaaacacagcgacc

SEQ ID NO: 50251 - RNA, 24 nt, Artificial Sequence
  Synthetic oligonucleotide: TRBC-301
ucugauggcucaaacacagcgacc

SEQ ID NO: 50252 - RNA, 18 nt, Artificial Sequence
  Synthetic oligonucleotide: TRBC-302
gacagcggaagugguugc

SEQ ID NO: 50253 - RNA, 19 nt, Artificial Sequence
  Synthetic oligonucleotide: TRBC-303
ugacagcggaagugguugc

SEQ ID NO: 50254 - RNA, 20 nt, Artificial Sequence
  Synthetic oligonucleotide: TRBC-30
uugacagcggaagugguugc

SEQ ID NO: 50255 - RNA, 21 nt, Artificial Sequence
  Synthetic oligonucleotide: TRBC-304
cuugacagcggaagugguugc

SEQ ID NO: 50256 - RNA, 22 nt, Artificial Sequence
  Synthetic oligonucleotide: TRBC-305
acuugacagcggaagugguugc

SEQ ID NO: 50257 - RNA, 23 nt, Artificial Sequence
  Synthetic oligonucleotide: TRBC-306
gacuugacagcggaagugguugc

SEQ ID NO: 50258 - RNA, 24 nt, Artificial Sequence
  Synthetic oligonucleotide: TRBC-307
ggacuugacagcggaagugguugc

SEQ ID NO: 50259 - RNA, 18 nt, Artificial Sequence
  Synthetic oligonucleotide: TRBC-308
gacagguuuggcccuauc

SEQ ID NO: 50260 - RNA, 19 nt, Artificial Sequence
  Synthetic oligonucleotide: TRBC-309
ugacagguuuggcccuauc

SEQ ID NO: 50261 - RNA, 20 nt, Artificial Sequence
  Synthetic oligonucleotide: TRBC-310
gugacagguuuggcccuauc

SEQ ID NO: 50262 - RNA, 18 nt, Artificial Sequence
  Synthetic oligonucleotide: TRBC-311
ggcugcucaggcaguauc

SEQ ID NO: 50263 - RNA, 19 nt, Artificial Sequence
  Synthetic oligonucleotide: TRBC-312
cggcugcucaggcaguauc

SEQ ID NO: 50264 - RNA, 20 nt, Artificial Sequence
  Synthetic oligonucleotide: TRBC-228
gcggcugcucaggcaguauc

SEQ ID NO: 50265 - RNA, 21 nt, Artificial Sequence
  Synthetic oligonucleotide: TRBC-313
ggcggcugcucaggcaguauc

SEQ ID NO: 50266 - RNA, 22 nt, Artificial Sequence
  Synthetic oligonucleotide: TRBC-314
aggcggcugcucaggcaguauc

SEQ ID NO: 50267 - RNA, 23 nt, Artificial Sequence
  Synthetic oligonucleotide: TRBC-315
caggcggcugcucaggcaguauc

SEQ ID NO: 50268 - RNA, 24 nt, Artificial Sequence
  Synthetic oligonucleotide: TRBC-316
ucaggcggcugcucaggcaguauc

SEQ ID NO: 50269 - RNA, 18 nt, Artificial Sequence
  Synthetic oligonucleotide: TRBC-317
gguuuuggagcuagccuc

SEQ ID NO: 50270 - RNA, 19 nt, Artificial Sequence
  Synthetic oligonucleotide: TRBC-318
ugguuuuggagcuagccuc

SEQ ID NO: 50271 - RNA, 20 nt, Artificial Sequence
  Synthetic oligonucleotide: TRBC-232
augguuuuggagcuagccuc

SEQ ID NO: 50272 - RNA, 21 nt, Artificial Sequence
  Synthetic oligonucleotide: TRBC-319
gaugguuuuggagcuagccuc

SEQ ID NO: 50273 - RNA, 22 nt, Artificial Sequence
  Synthetic oligonucleotide: TRBC-320
ggaugguuuuggagcuagccuc

SEQ ID NO: 50274 - RNA, 23 nt, Artificial Sequence
  Synthetic oligonucleotide: TRBC-321
gggaugguuuuggagcuagccuc

SEQ ID NO: 50275 - RNA, 24 nt, Artificial Sequence
  Synthetic oligonucleotide: TRBC-322
ugggaugguuuuggagcuagccuc

SEQ ID NO: 50276 - RNA, 18 nt, Artificial Sequence
  Synthetic oligonucleotide: TRBC-323
ggccucggcgcugacgau

SEQ ID NO: 50277 - RNA, 19 nt, Artificial Sequence
  Synthetic oligonucleotide: TRBC-324
aggccucggcgcugacgau

SEQ ID NO: 50278 - RNA, 20 nt, Artificial Sequence
  Synthetic oligonucleotide: TRBC-325
caggccucggcgcugacgau

SEQ ID NO: 50279 - RNA, 21 nt, Artificial Sequence
  Synthetic oligonucleotide: TRBC-326
ccaggccucggcgcugacgau

SEQ ID NO: 50280 - RNA, 22 nt, Artificial Sequence
  Synthetic oligonucleotide: TRBC-327
cccaggccucggcgcugacgau

SEQ ID NO: 50281 - RNA, 23 nt, Artificial Sequence
  Synthetic oligonucleotide: TRBC-328
ccccaggccucggcgcugacgau

SEQ ID NO: 50282 - RNA, 24 nt, Artificial Sequence
  Synthetic oligonucleotide: TRBC-329
accccaggccucggcgcugacgau

SEQ ID NO: 50283 - RNA, 21 nt, Artificial Sequence
  Synthetic oligonucleotide: TRBC-330
accagcucagcuccacguggu

SEQ ID NO: 50284 - RNA, 22 nt, Artificial Sequence
  Synthetic oligonucleotide: TRBC-331
caccagcucagcuccacguggu

SEQ ID NO: 50285 - RNA, 23 nt, Artificial Sequence
  Synthetic oligonucleotide: TRBC-332
ccaccagcucagcuccacguggu

SEQ ID NO: 50286 - RNA, 24 nt, Artificial Sequence
  Synthetic oligonucleotide: TRBC-333
cccaccagcucagcuccacguggu

SEQ ID NO: 50287 - RNA, 21 nt, Artificial Sequence
  Synthetic oligonucleotide: TRBC-334
caggcacaccaguguggccuu

SEQ ID NO: 50288 - RNA, 22 nt, Artificial Sequence
  Synthetic oligonucleotide: TRBC-335
ccaggcacaccaguguggccuu

SEQ ID NO: 50289 - RNA, 23 nt, Artificial Sequence
  Synthetic oligonucleotide: TRBC-336
gccaggcacaccaguguggccuu

SEQ ID NO: 50290 - RNA, 24 nt, Artificial Sequence
  Synthetic oligonucleotide: TRBC-337
ggccaggcacaccaguguggccuu

SEQ ID NO: 50291 - RNA, 21 nt, Artificial Sequence
  Synthetic oligonucleotide: TRBC-338
cuguggaagagagaacauuuu

SEQ ID NO: 50292 - RNA, 22 nt, Artificial Sequence
  Synthetic oligonucleotide: TRBC-339
ccuguggaagagagaacauuuu

SEQ ID NO: 50293 - RNA, 23 nt, Artificial Sequence
  Synthetic oligonucleotide: TRBC-340
accuguggaagagagaacauuuu

SEQ ID NO: 50294 - RNA, 24 nt, Artificial Sequence
  Synthetic oligonucleotide: TRBC-341
gaccuguggaagagagaacauuuu

SEQ ID NO: 50295 - RNA, 18 nt, Artificial Sequence
  Synthetic oligonucleotide: TRBC-342
augcucuguucuugucaa

SEQ ID NO: 50296 - RNA, 19 nt, Artificial Sequence
  Synthetic oligonucleotide: TRBC-343
caugcucuguucuugucaa

SEQ ID NO: 50297 - RNA, 20 nt, Artificial Sequence
  Synthetic oligonucleotide: TRBC-344
acaugcucuguucuugucaa

SEQ ID NO: 50298 - RNA, 21 nt, Artificial Sequence
  Synthetic oligonucleotide: TRBC-345
uacaugcucuguucuugucaa

SEQ ID NO: 50299 - RNA, 22 nt, Artificial Sequence
  Synthetic oligonucleotide: TRBC-346
cuacaugcucuguucuugucaa

SEQ ID NO: 50300 - RNA, 23 nt, Artificial Sequence
  Synthetic oligonucleotide: TRBC-347
ccuacaugcucuguucuugucaa

SEQ ID NO: 50301 - RNA, 24 nt, Artificial Sequence
  Synthetic oligonucleotide: TRBC-348
accuacaugcucuguucuugucaa

SEQ ID NO: 50302 - RNA, 18 nt, Artificial Sequence
  Synthetic oligonucleotide: TRBC-349
uggcuucaccuccgguaa

SEQ ID NO: 50303 - RNA, 19 nt, Artificial Sequence
  Synthetic oligonucleotide: TRBC-350
guggcuucaccuccgguaa

SEQ ID NO: 50304 - RNA, 20 nt, Artificial Sequence
  Synthetic oligonucleotide: TRBC-351
uguggcuucaccuccgguaa

SEQ ID NO: 50305 - RNA, 21 nt, Artificial Sequence
  Synthetic oligonucleotide: TRBC-352
cuguggcuucaccuccgguaa

SEQ ID NO: 50306 - RNA, 22 nt, Artificial Sequence
  Synthetic oligonucleotide: TRBC-353
acuguggcuucaccuccgguaa

SEQ ID NO: 50307 - RNA, 23 nt, Artificial Sequence
  Synthetic oligonucleotide: TRBC-354
gacuguggcuucaccuccgguaa

SEQ ID NO: 50308 - RNA, 24 nt, Artificial Sequence
  Synthetic oligonucleotide: TRBC-355
agacuguggcuucaccuccgguaa

SEQ ID NO: 50309 - RNA, 18 nt, Artificial Sequence
  Synthetic oligonucleotide: TRBC-356
aacagagucuuaccagca

SEQ ID NO: 50310 - RNA, 19 nt, Artificial Sequence
  Synthetic oligonucleotide: TRBC-357
caacagagucuuaccagca

SEQ ID NO: 50311 - RNA, 20 nt, Artificial Sequence
  Synthetic oligonucleotide: TRBC-22
ucaacagagucuuaccagca

SEQ ID NO: 50312 - RNA, 21 nt, Artificial Sequence
  Synthetic oligonucleotide: TRBC-358
ucucuuccacaggucaagaga

SEQ ID NO: 50313 - RNA, 22 nt, Artificial Sequence
  Synthetic oligonucleotide: TRBC-359
cucucuuccacaggucaagaga

SEQ ID NO: 50314 - RNA, 23 nt, Artificial Sequence
  Synthetic oligonucleotide: TRBC-360
ucucucuuccacaggucaagaga

SEQ ID NO: 50315 - RNA, 24 nt, Artificial Sequence
  Synthetic oligonucleotide: TRBC-361
uucucucuuccacaggucaagaga

SEQ ID NO: 50316 - RNA, 18 nt, Artificial Sequence
  Synthetic oligonucleotide: TRBC-362
gagaaugacgaguggacc

SEQ ID NO: 50317 - RNA, 19 nt, Artificial Sequence
  Synthetic oligonucleotide: TRBC-363
ggagaaugacgaguggacc

SEQ ID NO: 50318 - RNA, 20 nt, Artificial Sequence
  Synthetic oligonucleotide: TRBC-364
cggagaaugacgaguggacc

SEQ ID NO: 50319 - RNA, 21 nt, Artificial Sequence
  Synthetic oligonucleotide: TRBC-365
ucggagaaugacgaguggacc

SEQ ID NO: 50320 - RNA, 22 nt, Artificial Sequence
  Synthetic oligonucleotide: TRBC-366
cucggagaaugacgaguggacc

SEQ ID NO: 50321 - RNA, 23 nt, Artificial Sequence
  Synthetic oligonucleotide: TRBC-367
ucucggagaaugacgaguggacc

SEQ ID NO: 50322 - RNA, 24 nt, Artificial Sequence
  Synthetic oligonucleotide: TRBC-368
cucucggagaaugacgaguggacc

SEQ ID NO: 50323 - RNA, 18 nt, Artificial Sequence
  Synthetic oligonucleotide: TRBC-369
aucgucagcgccgaggcc

SEQ ID NO: 50324 - RNA, 19 nt, Artificial Sequence
  Synthetic oligonucleotide: TRBC-370
gaucgucagcgccgaggcc

SEQ ID NO: 50325 - RNA, 20 nt, Artificial Sequence
  Synthetic oligonucleotide: TRBC-216
agaucgucagcgccgaggcc

SEQ ID NO: 50326 - RNA, 21 nt, Artificial Sequence
  Synthetic oligonucleotide: TRBC-371
cagaucgucagcgccgaggcc

SEQ ID NO: 50327 - RNA, 22 nt, Artificial Sequence
  Synthetic oligonucleotide: TRBC-372
ccagaucgucagcgccgaggcc

SEQ ID NO: 50328 - RNA, 23 nt, Artificial Sequence
  Synthetic oligonucleotide: TRBC-373
cccagaucgucagcgccgaggcc

SEQ ID NO: 50329 - RNA, 24 nt, Artificial Sequence
  Synthetic oligonucleotide: TRBC-374
acccagaucgucagcgccgaggcc

SEQ ID NO: 50330 - RNA, 21 nt, Artificial Sequence
  Synthetic oligonucleotide: TRBC-375
ccgaggccugggguagagcag

SEQ ID NO: 50331 - RNA, 22 nt, Artificial Sequence
  Synthetic oligonucleotide: TRBC-376
gccgaggccugggguagagcag

SEQ ID NO: 50332 - RNA, 23 nt, Artificial Sequence
  Synthetic oligonucleotide: TRBC-377
cgccgaggccugggguagagcag

SEQ ID NO: 50333 - RNA, 24 nt, Artificial Sequence
  Synthetic oligonucleotide: TRBC-378
gcgccgaggccugggguagagcag

SEQ ID NO: 50334 - RNA, 18 nt, Artificial Sequence
  Synthetic oligonucleotide: TRBC-379
caguucuacgggcucucg

SEQ ID NO: 50335 - RNA, 19 nt, Artificial Sequence
  Synthetic oligonucleotide: TRBC-380
ccaguucuacgggcucucg

SEQ ID NO: 50336 - RNA, 20 nt, Artificial Sequence
  Synthetic oligonucleotide: TRBC-381
uccaguucuacgggcucucg

SEQ ID NO: 50337 - RNA, 21 nt, Artificial Sequence
  Synthetic oligonucleotide: TRBC-382
guccaguucuacgggcucucg

SEQ ID NO: 50338 - RNA, 22 nt, Artificial Sequence
  Synthetic oligonucleotide: TRBC-383
aguccaguucuacgggcucucg

SEQ ID NO: 50339 - RNA, 23 nt, Artificial Sequence
  Synthetic oligonucleotide: TRBC-384
aaguccaguucuacgggcucucg

SEQ ID NO: 50340 - RNA, 24 nt, Artificial Sequence
  Synthetic oligonucleotide: TRBC-385
caaguccaguucuacgggcucucg

SEQ ID NO: 50341 - RNA, 18 nt, Artificial Sequence
  Synthetic oligonucleotide: TRBC-386
acgggcucucggagaaug

SEQ ID NO: 50342 - RNA, 19 nt, Artificial Sequence
  Synthetic oligonucleotide: TRBC-387
uacgggcucucggagaaug

SEQ ID NO: 50343 - RNA, 20 nt, Artificial Sequence
  Synthetic oligonucleotide: TRBC-388
cuacgggcucucggagaaug

SEQ ID NO: 50344 - RNA, 21 nt, Artificial Sequence
  Synthetic oligonucleotide: TRBC-389
ucuacgggcucucggagaaug

SEQ ID NO: 50345 - RNA, 22 nt, Artificial Sequence
  Synthetic oligonucleotide: TRBC-390
uucuacgggcucucggagaaug

SEQ ID NO: 50346 - RNA, 23 nt, Artificial Sequence
  Synthetic oligonucleotide: TRBC-391
guucuacgggcucucggagaaug

SEQ ID NO: 50347 - RNA, 24 nt, Artificial Sequence
  Synthetic oligonucleotide: TRBC-392
aguucuacgggcucucggagaaug

SEQ ID NO: 50348 - RNA, 21 nt, Artificial Sequence
  Synthetic oligonucleotide: TRBC-393
cgaccacguggagcugagcug

SEQ ID NO: 50349 - RNA, 22 nt, Artificial Sequence
  Synthetic oligonucleotide: TRBC-394
ccgaccacguggagcugagcug

SEQ ID NO: 50350 - RNA, 23 nt, Artificial Sequence
  Synthetic oligonucleotide: TRBC-395
cccgaccacguggagcugagcug

SEQ ID NO: 50351 - RNA, 24 nt, Artificial Sequence
  Synthetic oligonucleotide: TRBC-396
ccccgaccacguggagcugagcug

SEQ ID NO: 50352 - RNA, 18 nt, Artificial Sequence
  Synthetic oligonucleotide: TRBC-397
cugccugagcagccgccu

SEQ ID NO: 50353 - RNA, 19 nt, Artificial Sequence
  Synthetic oligonucleotide: TRBC-398
acugccugagcagccgccu

SEQ ID NO: 50354 - RNA, 20 nt, Artificial Sequence
  Synthetic oligonucleotide: TRBC-399
uacugccugagcagccgccu

SEQ ID NO: 50355 - RNA, 21 nt, Artificial Sequence
  Synthetic oligonucleotide: TRBC-400
auacugccugagcagccgccu

SEQ ID NO: 50356 - RNA, 22 nt, Artificial Sequence
  Synthetic oligonucleotide: TRBC-401
gauacugccugagcagccgccu

SEQ ID NO: 50357 - RNA, 23 nt, Artificial Sequence
  Synthetic oligonucleotide: TRBC-402
agauacugccugagcagccgccu

SEQ ID NO: 50358 - RNA, 24 nt, Artificial Sequence
  Synthetic oligonucleotide: TRBC-403
cagauacugccugagcagccgccu

SEQ ID NO: 50359 - RNA, 18 nt, Artificial Sequence
  Synthetic oligonucleotide: TRBC-404
gaaaacaggggaagaaaa

SEQ ID NO: 50360 - RNA, 19 nt, Artificial Sequence
  Synthetic oligonucleotide: TRBC-405
agaaaacaggggaagaaaa

SEQ ID NO: 50361 - RNA, 20 nt, Artificial Sequence
  Synthetic oligonucleotide: TRBC-406
aagaaaacaggggaagaaaa

SEQ ID NO: 50362 - RNA, 21 nt, Artificial Sequence
  Synthetic oligonucleotide: TRBC-407
aaagaaaacaggggaagaaaa

SEQ ID NO: 50363 - RNA, 22 nt, Artificial Sequence
  Synthetic oligonucleotide: TRBC-408
gaaagaaaacaggggaagaaaa

SEQ ID NO: 50364 - RNA, 23 nt, Artificial Sequence
  Synthetic oligonucleotide: TRBC-409
ugaaagaaaacaggggaagaaaa

SEQ ID NO: 50365 - RNA, 24 nt, Artificial Sequence
  Synthetic oligonucleotide: TRBC-410
cugaaagaaaacaggggaagaaaa

SEQ ID NO: 50366 - RNA, 18 nt, Artificial Sequence
  Synthetic oligonucleotide: TRBC-411
cccuagcaagaucucaua

SEQ ID NO: 50367 - RNA, 19 nt, Artificial Sequence
  Synthetic oligonucleotide: TRBC-412
ucccuagcaagaucucaua

SEQ ID NO: 50368 - RNA, 20 nt, Artificial Sequence
  Synthetic oligonucleotide: TRBC-413
uucccuagcaagaucucaua

SEQ ID NO: 50369 - RNA, 21 nt, Artificial Sequence
  Synthetic oligonucleotide: TRBC-414
ggugacagguuuggcccuauc

SEQ ID NO: 50370 - RNA, 22 nt, Artificial Sequence
  Synthetic oligonucleotide: TRBC-415
gggugacagguuuggcccuauc

SEQ ID NO: 50371 - RNA, 23 nt, Artificial Sequence
  Synthetic oligonucleotide: TRBC-416
ugggugacagguuuggcccuauc

SEQ ID NO: 50372 - RNA, 24 nt, Artificial Sequence
  Synthetic oligonucleotide: TRBC-417
cugggugacagguuuggcccuauc

SEQ ID NO: 50373 - RNA, 18 nt, Artificial Sequence
  Synthetic oligonucleotide: TRBC-418
gcugcuccuugaggggcu

SEQ ID NO: 50374 - RNA, 19 nt, Artificial Sequence
  Synthetic oligonucleotide: TRBC-419
ggcugcuccuugaggggcu

SEQ ID NO: 50375 - RNA, 20 nt, Artificial Sequence
  Synthetic oligonucleotide: TRBC-420
gggcugcuccuugaggggcu

SEQ ID NO: 50376 - RNA, 21 nt, Artificial Sequence
  Synthetic oligonucleotide: TRBC-421
cgggcugcuccuugaggggcu

SEQ ID NO: 50377 - RNA, 22 nt, Artificial Sequence
  Synthetic oligonucleotide: TRBC-422
gcgggcugcuccuugaggggcu

SEQ ID NO: 50378 - RNA, 23 nt, Artificial Sequence
  Synthetic oligonucleotide: TRBC-423
ggcgggcugcuccuugaggggcu

SEQ ID NO: 50379 - RNA, 24 nt, Artificial Sequence
  Synthetic oligonucleotide: TRBC-424
gggcgggcugcuccuugaggggcu

SEQ ID NO: 50380 - RNA, 18 nt, Artificial Sequence
  Synthetic oligonucleotide: TRBC-425
agcucagcuccacguggu

SEQ ID NO: 50381 - RNA, 19 nt, Artificial Sequence
  Synthetic oligonucleotide: TRBC-426
cagcucagcuccacguggu

SEQ ID NO: 50382 - RNA, 20 nt, Artificial Sequence
  Synthetic oligonucleotide: TRBC-284
ccagcucagcuccacguggu

SEQ ID NO: 50383 - RNA, 18 nt, Artificial Sequence
  Synthetic oligonucleotide: TRBC-427
gcacaccaguguggccuu

SEQ ID NO: 50384 - RNA, 19 nt, Artificial Sequence
  Synthetic oligonucleotide: TRBC-428
ggcacaccaguguggccuu

SEQ ID NO: 50385 - RNA, 20 nt, Artificial Sequence
  Synthetic oligonucleotide: TRBC-429
aggcacaccaguguggccuu

SEQ ID NO: 50386 - RNA, 18 nt, Artificial Sequence
  Synthetic oligonucleotide: TRBC-430
uggaagagagaacauuuu

SEQ ID NO: 50387 - RNA, 19 nt, Artificial Sequence
  Synthetic oligonucleotide: TRBC-431
guggaagagagaacauuuu

SEQ ID NO: 50388 - RNA, 20 nt, Artificial Sequence
  Synthetic oligonucleotide: TRBC-432
uguggaagagagaacauuuu

SEQ ID NO: 50389 - RNA, 21 nt, Artificial Sequence
  Synthetic oligonucleotide: TRBC-433
gucaacagagucuuaccagca

SEQ ID NO: 50390 - RNA, 22 nt, Artificial Sequence
  Synthetic oligonucleotide: TRBC-434
ugucaacagagucuuaccagca

SEQ ID NO: 50391 - RNA, 23 nt, Artificial Sequence
  Synthetic oligonucleotide: TRBC-435
uugucaacagagucuuaccagca

SEQ ID NO: 50392 - RNA, 24 nt, Artificial Sequence
  Synthetic oligonucleotide: TRBC-436
cuugucaacagagucuuaccagca

SEQ ID NO: 50393 - RNA, 18 nt, Artificial Sequence
  Synthetic oligonucleotide: TRBC-437
cuuccacaggucaagaga

SEQ ID NO: 50394 - RNA, 19 nt, Artificial Sequence
  Synthetic oligonucleotide: TRBC-438
ucuuccacaggucaagaga

SEQ ID NO: 50395 - RNA, 20 nt, Artificial Sequence
  Synthetic oligonucleotide: TRBC-439
cucuuccacaggucaagaga

SEQ ID NO: 50396 - RNA, 18 nt, Artificial Sequence
  Synthetic oligonucleotide: TRBC-440
ugggaaggaggugcacag

SEQ ID NO: 50397 - RNA, 19 nt, Artificial Sequence
  Synthetic oligonucleotide: TRBC-441
augggaaggaggugcacag

SEQ ID NO: 50398 - RNA, 20 nt, Artificial Sequence
  Synthetic oligonucleotide: TRBC-240
aaugggaaggaggugcacag

SEQ ID NO: 50399 - RNA, 21 nt, Artificial Sequence
  Synthetic oligonucleotide: TRBC-442
gaaugggaaggaggugcacag

SEQ ID NO: 50400 - RNA, 22 nt, Artificial Sequence
  Synthetic oligonucleotide: TRBC-443
ugaaugggaaggaggugcacag

SEQ ID NO: 50401 - RNA, 23 nt, Artificial Sequence
  Synthetic oligonucleotide: TRBC-444
gugaaugggaaggaggugcacag

SEQ ID NO: 50402 - RNA, 24 nt, Artificial Sequence
  Synthetic oligonucleotide: TRBC-445
ggugaaugggaaggaggugcacag

SEQ ID NO: 50403 - RNA, 18 nt, Artificial Sequence
  Synthetic oligonucleotide: TRBC-446
aggccugggguagagcag

SEQ ID NO: 50404 - RNA, 19 nt, Artificial Sequence
  Synthetic oligonucleotide: TRBC-447
gaggccugggguagagcag

SEQ ID NO: 50405 - RNA, 20 nt, Artificial Sequence
  Synthetic oligonucleotide: TRBC-448
cgaggccugggguagagcag

SEQ ID NO: 50406 - RNA, 18 nt, Artificial Sequence
  Synthetic oligonucleotide: TRBC-449
gauggccaugguaaggag

SEQ ID NO: 50407 - RNA, 19 nt, Artificial Sequence
  Synthetic oligonucleotide: TRBC-450
ugauggccaugguaaggag

SEQ ID NO: 50408 - RNA, 20 nt, Artificial Sequence
  Synthetic oligonucleotide: TRBC-451
cugauggccaugguaaggag

SEQ ID NO: 50409 - RNA, 21 nt, Artificial Sequence
  Synthetic oligonucleotide: TRBC-452
gcugauggccaugguaaggag

SEQ ID NO: 50410 - RNA, 22 nt, Artificial Sequence
  Synthetic oligonucleotide: TRBC-453
ugcugauggccaugguaaggag

SEQ ID NO: 50411 - RNA, 23 nt, Artificial Sequence
  Synthetic oligonucleotide: TRBC-454
gugcugauggccaugguaaggag

SEQ ID NO: 50412 - RNA, 24 nt, Artificial Sequence
  Synthetic oligonucleotide: TRBC-455
cgugcugauggccaugguaaggag

SEQ ID NO: 50413 - RNA, 18 nt, Artificial Sequence
  Synthetic oligonucleotide: TRBC-456
ccaugguaaggaggaggg

SEQ ID NO: 50414 - RNA, 19 nt, Artificial Sequence
  Synthetic oligonucleotide: TRBC-457
gccaugguaaggaggaggg

SEQ ID NO: 50415 - RNA, 20 nt, Artificial Sequence
  Synthetic oligonucleotide: TRBC-252
ggccaugguaaggaggaggg

SEQ ID NO: 50416 - RNA, 21 nt, Artificial Sequence
  Synthetic oligonucleotide: TRBC-458
uggccaugguaaggaggaggg

SEQ ID NO: 50417 - RNA, 22 nt, Artificial Sequence
  Synthetic oligonucleotide: TRBC-459
auggccaugguaaggaggaggg

SEQ ID NO: 50418 - RNA, 23 nt, Artificial Sequence
  Synthetic oligonucleotide: TRBC-460
gauggccaugguaaggaggaggg

SEQ ID NO: 50419 - RNA, 24 nt, Artificial Sequence
  Synthetic oligonucleotide: TRBC-461
ugauggccaugguaaggaggaggg

SEQ ID NO: 50420 - RNA, 18 nt, Artificial Sequence
  Synthetic oligonucleotide: TRBC-462
guggagcugagcuggugg

SEQ ID NO: 50421 - RNA, 19 nt, Artificial Sequence
  Synthetic oligonucleotide: TRBC-463
cguggagcugagcuggugg

SEQ ID NO: 50422 - RNA, 20 nt, Artificial Sequence
  Synthetic oligonucleotide: TRBC-464
acguggagcugagcuggugg

SEQ ID NO: 50423 - RNA, 21 nt, Artificial Sequence
  Synthetic oligonucleotide: TRBC-465
cacguggagcugagcuggugg

SEQ ID NO: 50424 - RNA, 22 nt, Artificial Sequence
  Synthetic oligonucleotide: TRBC-466
ccacguggagcugagcuggugg

SEQ ID NO: 50425 - RNA, 23 nt, Artificial Sequence
  Synthetic oligonucleotide: TRBC-467
accacguggagcugagcuggugg

SEQ ID NO: 50426 - RNA, 24 nt, Artificial Sequence
  Synthetic oligonucleotide: TRBC-468
gaccacguggagcugagcuggugg

SEQ ID NO: 50427 - RNA, 18 nt, Artificial Sequence
  Synthetic oligonucleotide: TRBC-469
ccacguggagcugagcug

SEQ ID NO: 50428 - RNA, 19 nt, Artificial Sequence
  Synthetic oligonucleotide: TRBC-470
accacguggagcugagcug

SEQ ID NO: 50429 - RNA, 20 nt, Artificial Sequence
  Synthetic oligonucleotide: TRBC-471
gaccacguggagcugagcug

SEQ ID NO: 50430 - RNA, 18 nt, Artificial Sequence
  Synthetic oligonucleotide: TRBC-472
ccacagucugaaagaaaa

SEQ ID NO: 50431 - RNA, 19 nt, Artificial Sequence
  Synthetic oligonucleotide: TRBC-473
gccacagucugaaagaaaa

SEQ ID NO: 50432 - RNA, 20 nt, Artificial Sequence
  Synthetic oligonucleotide: TRBC-474
agccacagucugaaagaaaa

SEQ ID NO: 50433 - RNA, 21 nt, Artificial Sequence
  Synthetic oligonucleotide: TRBC-475
aagccacagucugaaagaaaa

SEQ ID NO: 50434 - RNA, 22 nt, Artificial Sequence
  Synthetic oligonucleotide: TRBC-476
gaagccacagucugaaagaaaa

SEQ ID NO: 50435 - RNA, 23 nt, Artificial Sequence
  Synthetic oligonucleotide: TRBC-477
ugaagccacagucugaaagaaaa

SEQ ID NO: 50436 - RNA, 24 nt, Artificial Sequence
  Synthetic oligonucleotide: TRBC-478
gugaagccacagucugaaagaaaa

SEQ ID NO: 50437 - RNA, 18 nt, Artificial Sequence
  Synthetic oligonucleotide: TRBC-479
uuucagguccucuggaaa

SEQ ID NO: 50438 - RNA, 19 nt, Artificial Sequence
  Synthetic oligonucleotide: TRBC-480
uuuucagguccucuggaaa

SEQ ID NO: 50439 - RNA, 20 nt, Artificial Sequence
  Synthetic oligonucleotide: TRBC-182
uuuuucagguccucuggaaa

SEQ ID NO: 50440 - RNA, 21 nt, Artificial Sequence
  Synthetic oligonucleotide: TRBC-481
guuuuucagguccucuggaaa

SEQ ID NO: 50441 - RNA, 22 nt, Artificial Sequence
  Synthetic oligonucleotide: TRBC-482
cguuuuucagguccucuggaaa

SEQ ID NO: 50442 - RNA, 23 nt, Artificial Sequence
  Synthetic oligonucleotide: TRBC-483
acguuuuucagguccucuggaaa

SEQ ID NO: 50443 - RNA, 24 nt, Artificial Sequence
  Synthetic oligonucleotide: TRBC-484
cacguuuuucagguccucuggaaa

SEQ ID NO: 50444 - RNA, 18 nt, Artificial Sequence
  Synthetic oligonucleotide: TRBC-485
agacucuguugacaagaa

SEQ ID NO: 50445 - RNA, 19 nt, Artificial Sequence
  Synthetic oligonucleotide: TRBC-486
aagacucuguugacaagaa

SEQ ID NO: 50446 - RNA, 20 nt, Artificial Sequence
  Synthetic oligonucleotide: TRBC-487
uaagacucuguugacaagaa

SEQ ID NO: 50447 - RNA, 21 nt, Artificial Sequence
  Synthetic oligonucleotide: TRBC-488
guaagacucuguugacaagaa

SEQ ID NO: 50448 - RNA, 22 nt, Artificial Sequence
  Synthetic oligonucleotide: TRBC-489
gguaagacucuguugacaagaa

SEQ ID NO: 50449 - RNA, 23 nt, Artificial Sequence
  Synthetic oligonucleotide: TRBC-490
ugguaagacucuguugacaagaa

SEQ ID NO: 50450 - RNA, 24 nt, Artificial Sequence
  Synthetic oligonucleotide: TRBC-491
cugguaagacucuguugacaagaa

SEQ ID NO: 50451 - RNA, 18 nt, Artificial Sequence
  Synthetic oligonucleotide: TRBC-492
cuccgagagcccguagaa

SEQ ID NO: 50452 - RNA, 19 nt, Artificial Sequence
  Synthetic oligonucleotide: TRBC-493
ucuccgagagcccguagaa

SEQ ID NO: 50453 - RNA, 20 nt, Artificial Sequence
  Synthetic oligonucleotide: TRBC-494
uucuccgagagcccguagaa

SEQ ID NO: 50454 - RNA, 21 nt, Artificial Sequence
  Synthetic oligonucleotide: TRBC-495
auucuccgagagcccguagaa

SEQ ID NO: 50455 - RNA, 22 nt, Artificial Sequence
  Synthetic oligonucleotide: TRBC-496
cauucuccgagagcccguagaa

SEQ ID NO: 50456 - RNA, 23 nt, Artificial Sequence
  Synthetic oligonucleotide: TRBC-497
ucauucuccgagagcccguagaa

SEQ ID NO: 50457 - RNA, 24 nt, Artificial Sequence
  Synthetic oligonucleotide: TRBC-498
gucauucuccgagagcccguagaa

SEQ ID NO: 50458 - RNA, 18 nt, Artificial Sequence
  Synthetic oligonucleotide: TRBC-499
uuuucagguccucuggaa

SEQ ID NO: 50459 - RNA, 19 nt, Artificial Sequence
  Synthetic oligonucleotide: TRBC-500
uuuuucagguccucuggaa

SEQ ID NO: 50460 - RNA, 20 nt, Artificial Sequence
  Synthetic oligonucleotide: TRBC-185
guuuuucagguccucuggaa

SEQ ID NO: 50461 - RNA, 21 nt, Artificial Sequence
  Synthetic oligonucleotide: TRBC-501
cguuuuucagguccucuggaa

SEQ ID NO: 50462 - RNA, 22 nt, Artificial Sequence
  Synthetic oligonucleotide: TRBC-502
acguuuuucagguccucuggaa

SEQ ID NO: 50463 - RNA, 23 nt, Artificial Sequence
  Synthetic oligonucleotide: TRBC-503
cacguuuuucagguccucuggaa

SEQ ID NO: 50464 - RNA, 24 nt, Artificial Sequence
  Synthetic oligonucleotide: TRBC-504
acacguuuuucagguccucuggaa

SEQ ID NO: 50465 - RNA, 18 nt, Artificial Sequence
  Synthetic oligonucleotide: TRBC-505
uucucuugaccuguggaa

SEQ ID NO: 50466 - RNA, 19 nt, Artificial Sequence
  Synthetic oligonucleotide: TRBC-506
uuucucuugaccuguggaa

SEQ ID NO: 50467 - RNA, 20 nt, Artificial Sequence
  Synthetic oligonucleotide: TRBC-507
cuuucucuugaccuguggaa

SEQ ID NO: 50468 - RNA, 21 nt, Artificial Sequence
  Synthetic oligonucleotide: TRBC-508
ccuuucucuugaccuguggaa

SEQ ID NO: 50469 - RNA, 22 nt, Artificial Sequence
  Synthetic oligonucleotide: TRBC-509
uccuuucucuugaccuguggaa

SEQ ID NO: 50470 - RNA, 23 nt, Artificial Sequence
  Synthetic oligonucleotide: TRBC-510
auccuuucucuugaccuguggaa

SEQ ID NO: 50471 - RNA, 24 nt, Artificial Sequence
  Synthetic oligonucleotide: TRBC-511
aauccuuucucuugaccuguggaa

SEQ ID NO: 50472 - RNA, 18 nt, Artificial Sequence
  Synthetic oligonucleotide: TRBC-512
uggaaagggaagagguaa

SEQ ID NO: 50473 - RNA, 19 nt, Artificial Sequence
  Synthetic oligonucleotide: TRBC-513
cuggaaagggaagagguaa

SEQ ID NO: 50474 - RNA, 20 nt, Artificial Sequence
  Synthetic oligonucleotide: TRBC-187
ucuggaaagggaagagguaa

SEQ ID NO: 50475 - RNA, 21 nt, Artificial Sequence
  Synthetic oligonucleotide: TRBC-514
cucuggaaagggaagagguaa

SEQ ID NO: 50476 - RNA, 22 nt, Artificial Sequence
  Synthetic oligonucleotide: TRBC-515
ccucuggaaagggaagagguaa

SEQ ID NO: 50477 - RNA, 23 nt, Artificial Sequence
  Synthetic oligonucleotide: TRBC-516
uccucuggaaagggaagagguaa

SEQ ID NO: 50478 - RNA, 24 nt, Artificial Sequence
  Synthetic oligonucleotide: TRBC-517
guccucuggaaagggaagagguaa

SEQ ID NO: 50479 - RNA, 18 nt, Artificial Sequence
  Synthetic oligonucleotide: TRBC-518
acagucugaaagaaaaca

SEQ ID NO: 50480 - RNA, 19 nt, Artificial Sequence
  Synthetic oligonucleotide: TRBC-519
cacagucugaaagaaaaca

SEQ ID NO: 50481 - RNA, 20 nt, Artificial Sequence
  Synthetic oligonucleotide: TRBC-188
ccacagucugaaagaaaaca

SEQ ID NO: 50482 - RNA, 21 nt, Artificial Sequence
  Synthetic oligonucleotide: TRBC-520
gccacagucugaaagaaaaca

SEQ ID NO: 50483 - RNA, 22 nt, Artificial Sequence
  Synthetic oligonucleotide: TRBC-521
agccacagucugaaagaaaaca

SEQ ID NO: 50484 - RNA, 23 nt, Artificial Sequence
  Synthetic oligonucleotide: TRBC-522
aagccacagucugaaagaaaaca

SEQ ID NO: 50485 - RNA, 24 nt, Artificial Sequence
  Synthetic oligonucleotide: TRBC-523
gaagccacagucugaaagaaaaca

SEQ ID NO: 50486 - RNA, 18 nt, Artificial Sequence
  Synthetic oligonucleotide: TRBC-524
guagaacuggacuugaca

SEQ ID NO: 50487 - RNA, 19 nt, Artificial Sequence
  Synthetic oligonucleotide: TRBC-525
cguagaacuggacuugaca

SEQ ID NO: 50488 - RNA, 20 nt, Artificial Sequence
  Synthetic oligonucleotide: TRBC-526
ccguagaacuggacuugaca

SEQ ID NO: 50489 - RNA, 21 nt, Artificial Sequence
  Synthetic oligonucleotide: TRBC-527
cccguagaacuggacuugaca

SEQ ID NO: 50490 - RNA, 22 nt, Artificial Sequence
  Synthetic oligonucleotide: TRBC-528
gcccguagaacuggacuugaca

SEQ ID NO: 50491 - RNA, 23 nt, Artificial Sequence
  Synthetic oligonucleotide: TRBC-529
agcccguagaacuggacuugaca

SEQ ID NO: 50492 - RNA, 24 nt, Artificial Sequence
  Synthetic oligonucleotide: TRBC-530
gagcccguagaacuggacuugaca

SEQ ID NO: 50493 - RNA, 18 nt, Artificial Sequence
  Synthetic oligonucleotide: TRBC-531
uucccuagcaagaucuca

SEQ ID NO: 50494 - RNA, 19 nt, Artificial Sequence
  Synthetic oligonucleotide: TRBC-532
cuucccuagcaagaucuca

SEQ ID NO: 50495 - RNA, 20 nt, Artificial Sequence
  Synthetic oligonucleotide: TRBC-533
ccuucccuagcaagaucuca

SEQ ID NO: 50496 - RNA, 21 nt, Artificial Sequence
  Synthetic oligonucleotide: TRBC-534
gccuucccuagcaagaucuca

SEQ ID NO: 50497 - RNA, 22 nt, Artificial Sequence
  Synthetic oligonucleotide: TRBC-535
ggccuucccuagcaagaucuca

SEQ ID NO: 50498 - RNA, 23 nt, Artificial Sequence
  Synthetic oligonucleotide: TRBC-536
uggccuucccuagcaagaucuca

SEQ ID NO: 50499 - RNA, 24 nt, Artificial Sequence
  Synthetic oligonucleotide: TRBC-537
guggccuucccuagcaagaucuca

SEQ ID NO: 50500 - RNA, 18 nt, Artificial Sequence
  Synthetic oligonucleotide: TRBC-538
aggcaguaucuggaguca

SEQ ID NO: 50501 - RNA, 19 nt, Artificial Sequence
  Synthetic oligonucleotide: TRBC-539
caggcaguaucuggaguca

SEQ ID NO: 50502 - RNA, 20 nt, Artificial Sequence
  Synthetic oligonucleotide: TRBC-540
ucaggcaguaucuggaguca

SEQ ID NO: 50503 - RNA, 21 nt, Artificial Sequence
  Synthetic oligonucleotide: TRBC-541
cucaggcaguaucuggaguca

SEQ ID NO: 50504 - RNA, 22 nt, Artificial Sequence
  Synthetic oligonucleotide: TRBC-542
gcucaggcaguaucuggaguca

SEQ ID NO: 50505 - RNA, 23 nt, Artificial Sequence
  Synthetic oligonucleotide: TRBC-543
ugcucaggcaguaucuggaguca

SEQ ID NO: 50506 - RNA, 24 nt, Artificial Sequence
  Synthetic oligonucleotide: TRBC-544
cugcucaggcaguaucuggaguca

SEQ ID NO: 50507 - RNA, 18 nt, Artificial Sequence
  Synthetic oligonucleotide: TRBC-545
cucuugaccuguggaaga

SEQ ID NO: 50508 - RNA, 19 nt, Artificial Sequence
  Synthetic oligonucleotide: TRBC-546
ucucuugaccuguggaaga

SEQ ID NO: 50509 - RNA, 20 nt, Artificial Sequence
  Synthetic oligonucleotide: TRBC-547
uucucuugaccuguggaaga

SEQ ID NO: 50510 - RNA, 21 nt, Artificial Sequence
  Synthetic oligonucleotide: TRBC-548
uuucucuugaccuguggaaga

SEQ ID NO: 50511 - RNA, 22 nt, Artificial Sequence
  Synthetic oligonucleotide: TRBC-549
cuuucucuugaccuguggaaga

SEQ ID NO: 50512 - RNA, 23 nt, Artificial Sequence
  Synthetic oligonucleotide: TRBC-550
ccuuucucuugaccuguggaaga

SEQ ID NO: 50513 - RNA, 24 nt, Artificial Sequence
  Synthetic oligonucleotide: TRBC-551
uccuuucucuugaccuguggaaga

SEQ ID NO: 50514 - RNA, 18 nt, Artificial Sequence
  Synthetic oligonucleotide: TRBC-552
auagaggaugguggcaga

SEQ ID NO: 50515 - RNA, 19 nt, Artificial Sequence
  Synthetic oligonucleotide: TRBC-553
cauagaggaugguggcaga

SEQ ID NO: 50516 - RNA, 20 nt, Artificial Sequence
  Synthetic oligonucleotide: TRBC-554
ucauagaggaugguggcaga

SEQ ID NO: 50517 - RNA, 21 nt, Artificial Sequence
  Synthetic oligonucleotide: TRBC-555
cucauagaggaugguggcaga

SEQ ID NO: 50518 - RNA, 22 nt, Artificial Sequence
  Synthetic oligonucleotide: TRBC-556
ucucauagaggaugguggcaga

SEQ ID NO: 50519 - RNA, 23 nt, Artificial Sequence
  Synthetic oligonucleotide: TRBC-557
aucucauagaggaugguggcaga

SEQ ID NO: 50520 - RNA, 24 nt, Artificial Sequence
  Synthetic oligonucleotide: TRBC-558
gaucucauagaggaugguggcaga

SEQ ID NO: 50521 - RNA, 18 nt, Artificial Sequence
  Synthetic oligonucleotide: TRBC-559
uuuuucagguccucugga

SEQ ID NO: 50522 - RNA, 19 nt, Artificial Sequence
  Synthetic oligonucleotide: TRBC-560
guuuuucagguccucugga

SEQ ID NO: 50523 - RNA, 20 nt, Artificial Sequence
  Synthetic oligonucleotide: TRBC-561
cguuuuucagguccucugga

SEQ ID NO: 50524 - RNA, 21 nt, Artificial Sequence
  Synthetic oligonucleotide: TRBC-562
acguuuuucagguccucugga

SEQ ID NO: 50525 - RNA, 22 nt, Artificial Sequence
  Synthetic oligonucleotide: TRBC-563
cacguuuuucagguccucugga

SEQ ID NO: 50526 - RNA, 23 nt, Artificial Sequence
  Synthetic oligonucleotide: TRBC-564
acacguuuuucagguccucugga

SEQ ID NO: 50527 - RNA, 24 nt, Artificial Sequence
  Synthetic oligonucleotide: TRBC-565
aacacguuuuucagguccucugga

SEQ ID NO: 50528 - RNA, 18 nt, Artificial Sequence
  Synthetic oligonucleotide: TRBC-566
ggugaagccacagucuga

SEQ ID NO: 50529 - RNA, 19 nt, Artificial Sequence
  Synthetic oligonucleotide: TRBC-567
aggugaagccacagucuga

SEQ ID NO: 50530 - RNA, 20 nt, Artificial Sequence
  Synthetic oligonucleotide: TRBC-568
gaggugaagccacagucuga

SEQ ID NO: 50531 - RNA, 21 nt, Artificial Sequence
  Synthetic oligonucleotide: TRBC-569
ggaggugaagccacagucuga

SEQ ID NO: 50532 - RNA, 22 nt, Artificial Sequence
  Synthetic oligonucleotide: TRBC-570
cggaggugaagccacagucuga

SEQ ID NO: 50533 - RNA, 23 nt, Artificial Sequence
  Synthetic oligonucleotide: TRBC-571
ccggaggugaagccacagucuga

SEQ ID NO: 50534 - RNA, 24 nt, Artificial Sequence
  Synthetic oligonucleotide: TRBC-572
accggaggugaagccacagucuga

SEQ ID NO: 50535 - RNA, 18 nt, Artificial Sequence
  Synthetic oligonucleotide: TRBC-573
cuggaaagggaagaggua

SEQ ID NO: 50536 - RNA, 19 nt, Artificial Sequence
  Synthetic oligonucleotide: TRBC-574
ucuggaaagggaagaggua

SEQ ID NO: 50537 - RNA, 20 nt, Artificial Sequence
  Synthetic oligonucleotide: TRBC-575
cucuggaaagggaagaggua

SEQ ID NO: 50538 - RNA, 21 nt, Artificial Sequence
  Synthetic oligonucleotide: TRBC-576
ccucuggaaagggaagaggua

SEQ ID NO: 50539 - RNA, 22 nt, Artificial Sequence
  Synthetic oligonucleotide: TRBC-577
uccucuggaaagggaagaggua

SEQ ID NO: 50540 - RNA, 23 nt, Artificial Sequence
  Synthetic oligonucleotide: TRBC-578
guccucuggaaagggaagaggua

SEQ ID NO: 50541 - RNA, 24 nt, Artificial Sequence
  Synthetic oligonucleotide: TRBC-579
gguccucuggaaagggaagaggua

SEQ ID NO: 50542 - RNA, 18 nt, Artificial Sequence
  Synthetic oligonucleotide: TRBC-580
aaaggagagacucacuua

SEQ ID NO: 50543 - RNA, 19 nt, Artificial Sequence
  Synthetic oligonucleotide: TRBC-581
aaaaggagagacucacuua

SEQ ID NO: 50544 - RNA, 20 nt, Artificial Sequence
  Synthetic oligonucleotide: TRBC-582
aaaaaggagagacucacuua

SEQ ID NO: 50545 - RNA, 21 nt, Artificial Sequence
  Synthetic oligonucleotide: TRBC-583
gaaaaaggagagacucacuua

SEQ ID NO: 50546 - RNA, 22 nt, Artificial Sequence
  Synthetic oligonucleotide: TRBC-584
agaaaaaggagagacucacuua

SEQ ID NO: 50547 - RNA, 23 nt, Artificial Sequence
  Synthetic oligonucleotide: TRBC-585
gagaaaaaggagagacucacuua

SEQ ID NO: 50548 - RNA, 24 nt, Artificial Sequence
  Synthetic oligonucleotide: TRBC-586
agagaaaaaggagagacucacuua

SEQ ID NO: 50549 - RNA, 18 nt, Artificial Sequence
  Synthetic oligonucleotide: TRBC-587
cacagucugaaagaaaac

SEQ ID NO: 50550 - RNA, 19 nt, Artificial Sequence
  Synthetic oligonucleotide: TRBC-588
ccacagucugaaagaaaac

SEQ ID NO: 50551 - RNA, 20 nt, Artificial Sequence
  Synthetic oligonucleotide: TRBC-205
gccacagucugaaagaaaac

SEQ ID NO: 50552 - RNA, 21 nt, Artificial Sequence
  Synthetic oligonucleotide: TRBC-589
agccacagucugaaagaaaac

SEQ ID NO: 50553 - RNA, 22 nt, Artificial Sequence
  Synthetic oligonucleotide: TRBC-590
aagccacagucugaaagaaaac

SEQ ID NO: 50554 - RNA, 23 nt, Artificial Sequence
  Synthetic oligonucleotide: TRBC-591
gaagccacagucugaaagaaaac

SEQ ID NO: 50555 - RNA, 24 nt, Artificial Sequence
  Synthetic oligonucleotide: TRBC-592
ugaagccacagucugaaagaaaac

SEQ ID NO: 50556 - RNA, 18 nt, Artificial Sequence
  Synthetic oligonucleotide: TRBC-593
uaccauggccaucagcac

SEQ ID NO: 50557 - RNA, 19 nt, Artificial Sequence
  Synthetic oligonucleotide: TRBC-594
uuaccauggccaucagcac

SEQ ID NO: 50558 - RNA, 20 nt, Artificial Sequence
  Synthetic oligonucleotide: TRBC-595
cuuaccauggccaucagcac

SEQ ID NO: 50559 - RNA, 21 nt, Artificial Sequence
  Synthetic oligonucleotide: TRBC-596
ccuuaccauggccaucagcac

SEQ ID NO: 50560 - RNA, 22 nt, Artificial Sequence
  Synthetic oligonucleotide: TRBC-597
uccuuaccauggccaucagcac

SEQ ID NO: 50561 - RNA, 23 nt, Artificial Sequence
  Synthetic oligonucleotide: TRBC-598
cuccuuaccauggccaucagcac

SEQ ID NO: 50562 - RNA, 24 nt, Artificial Sequence
  Synthetic oligonucleotide: TRBC-599
ccuccuuaccauggccaucagcac

SEQ ID NO: 50563 - RNA, 18 nt, Artificial Sequence
  Synthetic oligonucleotide: TRBC-600
ugguaagacucuguugac

SEQ ID NO: 50564 - RNA, 19 nt, Artificial Sequence
  Synthetic oligonucleotide: TRBC-601
cugguaagacucuguugac

SEQ ID NO: 50565 - RNA, 20 nt, Artificial Sequence
  Synthetic oligonucleotide: TRBC-602
gcugguaagacucuguugac

SEQ ID NO: 50566 - RNA, 21 nt, Artificial Sequence
  Synthetic oligonucleotide: TRBC-603
ugcugguaagacucuguugac

SEQ ID NO: 50567 - RNA, 22 nt, Artificial Sequence
  Synthetic oligonucleotide: TRBC-604
uugcugguaagacucuguugac

SEQ ID NO: 50568 - RNA, 23 nt, Artificial Sequence
  Synthetic oligonucleotide: TRBC-605
cuugcugguaagacucuguugac

SEQ ID NO: 50569 - RNA, 24 nt, Artificial Sequence
  Synthetic oligonucleotide: TRBC-606
ccuugcugguaagacucuguugac

SEQ ID NO: 50570 - RNA, 18 nt, Artificial Sequence
  Synthetic oligonucleotide: TRBC-607
aaggagagacucacuuac

SEQ ID NO: 50571 - RNA, 19 nt, Artificial Sequence
  Synthetic oligonucleotide: TRBC-608
aaaggagagacucacuuac

SEQ ID NO: 50572 - RNA, 20 nt, Artificial Sequence
  Synthetic oligonucleotide: TRBC-212
aaaaggagagacucacuuac

SEQ ID NO: 50573 - RNA, 21 nt, Artificial Sequence
  Synthetic oligonucleotide: TRBC-609
aaaaaggagagacucacuuac

SEQ ID NO: 50574 - RNA, 22 nt, Artificial Sequence
  Synthetic oligonucleotide: TRBC-610
gaaaaaggagagacucacuuac

SEQ ID NO: 50575 - RNA, 23 nt, Artificial Sequence
  Synthetic oligonucleotide: TRBC-611
agaaaaaggagagacucacuuac

SEQ ID NO: 50576 - RNA, 24 nt, Artificial Sequence
  Synthetic oligonucleotide: TRBC-612
gagaaaaaggagagacucacuuac

SEQ ID NO: 50577 - RNA, 18 nt, Artificial Sequence
  Synthetic oligonucleotide: TRBC-613
uugagggcgggcugcucc

SEQ ID NO: 50578 - RNA, 19 nt, Artificial Sequence
  Synthetic oligonucleotide: TRBC-614
auugagggcgggcugcucc

SEQ ID NO: 50579 - RNA, 20 nt, Artificial Sequence
  Synthetic oligonucleotide: TRBC-615
cauugagggcgggcugcucc

SEQ ID NO: 50580 - RNA, 21 nt, Artificial Sequence
  Synthetic oligonucleotide: TRBC-616
ucauugagggcgggcugcucc

SEQ ID NO: 50581 - RNA, 22 nt, Artificial Sequence
  Synthetic oligonucleotide: TRBC-617
gucauugagggcgggcugcucc

SEQ ID NO: 50582 - RNA, 23 nt, Artificial Sequence
  Synthetic oligonucleotide: TRBC-618
agucauugagggcgggcugcucc

SEQ ID NO: 50583 - RNA, 24 nt, Artificial Sequence
  Synthetic oligonucleotide: TRBC-619
gagucauugagggcgggcugcucc

SEQ ID NO: 50584 - RNA, 18 nt, Artificial Sequence
  Synthetic oligonucleotide: TRBC-620
guccacucgucauucucc

SEQ ID NO: 50585 - RNA, 19 nt, Artificial Sequence
  Synthetic oligonucleotide: TRBC-621
gguccacucgucauucucc

SEQ ID NO: 50586 - RNA, 20 nt, Artificial Sequence
  Synthetic oligonucleotide: TRBC-622
ggguccacucgucauucucc

SEQ ID NO: 50587 - RNA, 21 nt, Artificial Sequence
  Synthetic oligonucleotide: TRBC-623
uggguccacucgucauucucc

SEQ ID NO: 50588 - RNA, 22 nt, Artificial Sequence
  Synthetic oligonucleotide: TRBC-624
cuggguccacucgucauucucc

SEQ ID NO: 50589 - RNA, 23 nt, Artificial Sequence
  Synthetic oligonucleotide: TRBC-625
ccuggguccacucgucauucucc

SEQ ID NO: 50590 - RNA, 24 nt, Artificial Sequence
  Synthetic oligonucleotide: TRBC-626
uccuggguccacucgucauucucc

SEQ ID NO: 50591 - RNA, 18 nt, Artificial Sequence
  Synthetic oligonucleotide: TRBC-627
cuuaccauggccaucagc

SEQ ID NO: 50592 - RNA, 19 nt, Artificial Sequence
  Synthetic oligonucleotide: TRBC-628
ccuuaccauggccaucagc

SEQ ID NO: 50593 - RNA, 20 nt, Artificial Sequence
  Synthetic oligonucleotide: TRBC-629
uccuuaccauggccaucagc

SEQ ID NO: 50594 - RNA, 21 nt, Artificial Sequence
  Synthetic oligonucleotide: TRBC-630
cuccuuaccauggccaucagc

SEQ ID NO: 50595 - RNA, 22 nt, Artificial Sequence
  Synthetic oligonucleotide: TRBC-631
ccuccuuaccauggccaucagc

SEQ ID NO: 50596 - RNA, 23 nt, Artificial Sequence
  Synthetic oligonucleotide: TRBC-632
uccuccuuaccauggccaucagc

SEQ ID NO: 50597 - RNA, 24 nt, Artificial Sequence
  Synthetic oligonucleotide: TRBC-633
cuccuccuuaccauggccaucagc

SEQ ID NO: 50598 - RNA, 18 nt, Artificial Sequence
  Synthetic oligonucleotide: TRBC-634
gggaagagguaauggggc

SEQ ID NO: 50599 - RNA, 19 nt, Artificial Sequence
  Synthetic oligonucleotide: TRBC-635
agggaagagguaauggggc

SEQ ID NO: 50600 - RNA, 20 nt, Artificial Sequence
  Synthetic oligonucleotide: TRBC-636
aagggaagagguaauggggc

SEQ ID NO: 50601 - RNA, 21 nt, Artificial Sequence
  Synthetic oligonucleotide: TRBC-637
aaagggaagagguaauggggc

SEQ ID NO: 50602 - RNA, 22 nt, Artificial Sequence
  Synthetic oligonucleotide: TRBC-638
gaaagggaagagguaauggggc

SEQ ID NO: 50603 - RNA, 23 nt, Artificial Sequence
  Synthetic oligonucleotide: TRBC-639
ggaaagggaagagguaauggggc

SEQ ID NO: 50604 - RNA, 24 nt, Artificial Sequence
  Synthetic oligonucleotide: TRBC-640
uggaaagggaagagguaauggggc

SEQ ID NO: 50605 - RNA, 18 nt, Artificial Sequence
  Synthetic oligonucleotide: TRBC-641
ugguugcggggguucugc

SEQ ID NO: 50606 - RNA, 19 nt, Artificial Sequence
  Synthetic oligonucleotide: TRBC-642
gugguugcggggguucugc

SEQ ID NO: 50607 - RNA, 20 nt, Artificial Sequence
  Synthetic oligonucleotide: TRBC-643
agugguugcggggguucugc

SEQ ID NO: 50608 - RNA, 21 nt, Artificial Sequence
  Synthetic oligonucleotide: TRBC-644
aagugguugcggggguucugc

SEQ ID NO: 50609 - RNA, 22 nt, Artificial Sequence
  Synthetic oligonucleotide: TRBC-645
gaagugguugcggggguucugc

SEQ ID NO: 50610 - RNA, 23 nt, Artificial Sequence
  Synthetic oligonucleotide: TRBC-646
ggaagugguugcggggguucugc

SEQ ID NO: 50611 - RNA, 24 nt, Artificial Sequence
  Synthetic oligonucleotide: TRBC-647
cggaagugguugcggggguucugc

SEQ ID NO: 50612 - RNA, 18 nt, Artificial Sequence
  Synthetic oligonucleotide: TRBC-648
cacguuuuucagguccuc

SEQ ID NO: 50613 - RNA, 19 nt, Artificial Sequence
  Synthetic oligonucleotide: TRBC-649
acacguuuuucagguccuc

SEQ ID NO: 50614 - RNA, 20 nt, Artificial Sequence
  Synthetic oligonucleotide: TRBC-31
aacacguuuuucagguccuc

SEQ ID NO: 50615 - RNA, 21 nt, Artificial Sequence
  Synthetic oligonucleotide: TRBC-650
gaacacguuuuucagguccuc

SEQ ID NO: 50616 - RNA, 22 nt, Artificial Sequence
  Synthetic oligonucleotide: TRBC-651
ggaacacguuuuucagguccuc

SEQ ID NO: 50617 - RNA, 23 nt, Artificial Sequence
  Synthetic oligonucleotide: TRBC-652
gggaacacguuuuucagguccuc

SEQ ID NO: 50618 - RNA, 24 nt, Artificial Sequence
  Synthetic oligonucleotide: TRBC-653
ugggaacacguuuuucagguccuc

SEQ ID NO: 50619 - RNA, 18 nt, Artificial Sequence
  Synthetic oligonucleotide: TRBC-654
cagucugaaagaaaacag

SEQ ID NO: 50620 - RNA, 19 nt, Artificial Sequence
  Synthetic oligonucleotide: TRBC-655
acagucugaaagaaaacag

SEQ ID NO: 50621 - RNA, 20 nt, Artificial Sequence
  Synthetic oligonucleotide: TRBC-239
cacagucugaaagaaaacag

SEQ ID NO: 50622 - RNA, 21 nt, Artificial Sequence
  Synthetic oligonucleotide: TRBC-656
ccacagucugaaagaaaacag

SEQ ID NO: 50623 - RNA, 22 nt, Artificial Sequence
  Synthetic oligonucleotide: TRBC-657
gccacagucugaaagaaaacag

SEQ ID NO: 50624 - RNA, 23 nt, Artificial Sequence
  Synthetic oligonucleotide: TRBC-658
agccacagucugaaagaaaacag

SEQ ID NO: 50625 - RNA, 24 nt, Artificial Sequence
  Synthetic oligonucleotide: TRBC-659
aagccacagucugaaagaaaacag

SEQ ID NO: 50626 - RNA, 18 nt, Artificial Sequence
  Synthetic oligonucleotide: TRBC-660
uagaacuggacuugacag

SEQ ID NO: 50627 - RNA, 19 nt, Artificial Sequence
  Synthetic oligonucleotide: TRBC-661
guagaacuggacuugacag

SEQ ID NO: 50628 - RNA, 20 nt, Artificial Sequence
  Synthetic oligonucleotide: TRBC-34
cguagaacuggacuugacag

SEQ ID NO: 50629 - RNA, 21 nt, Artificial Sequence
  Synthetic oligonucleotide: TRBC-662
ccguagaacuggacuugacag

SEQ ID NO: 50630 - RNA, 22 nt, Artificial Sequence
  Synthetic oligonucleotide: TRBC-663
cccguagaacuggacuugacag

SEQ ID NO: 50631 - RNA, 23 nt, Artificial Sequence
  Synthetic oligonucleotide: TRBC-664
gcccguagaacuggacuugacag

SEQ ID NO: 50632 - RNA, 24 nt, Artificial Sequence
  Synthetic oligonucleotide: TRBC-665
agcccguagaacuggacuugacag

SEQ ID NO: 50633 - RNA, 18 nt, Artificial Sequence
  Synthetic oligonucleotide: TRBC-666
gagacucacuuaccggag

SEQ ID NO: 50634 - RNA, 19 nt, Artificial Sequence
  Synthetic oligonucleotide: TRBC-667
agagacucacuuaccggag

SEQ ID NO: 50635 - RNA, 20 nt, Artificial Sequence
  Synthetic oligonucleotide: TRBC-668
gagagacucacuuaccggag

SEQ ID NO: 50636 - RNA, 21 nt, Artificial Sequence
  Synthetic oligonucleotide: TRBC-669
ggagagacucacuuaccggag

SEQ ID NO: 50637 - RNA, 22 nt, Artificial Sequence
  Synthetic oligonucleotide: TRBC-670
aggagagacucacuuaccggag

SEQ ID NO: 50638 - RNA, 23 nt, Artificial Sequence
  Synthetic oligonucleotide: TRBC-671
aaggagagacucacuuaccggag

SEQ ID NO: 50639 - RNA, 24 nt, Artificial Sequence
  Synthetic oligonucleotide: TRBC-672
aaaggagagacucacuuaccggag

SEQ ID NO: 50640 - RNA, 18 nt, Artificial Sequence
  Synthetic oligonucleotide: TRBC-673
ucauucuccgagagcccg

SEQ ID NO: 50641 - RNA, 19 nt, Artificial Sequence
  Synthetic oligonucleotide: TRBC-674
gucauucuccgagagcccg

SEQ ID NO: 50642 - RNA, 20 nt, Artificial Sequence
  Synthetic oligonucleotide: TRBC-675
cgucauucuccgagagcccg

SEQ ID NO: 50643 - RNA, 21 nt, Artificial Sequence
  Synthetic oligonucleotide: TRBC-676
ucgucauucuccgagagcccg

SEQ ID NO: 50644 - RNA, 22 nt, Artificial Sequence
  Synthetic oligonucleotide: TRBC-677
cucgucauucuccgagagcccg

SEQ ID NO: 50645 - RNA, 23 nt, Artificial Sequence
  Synthetic oligonucleotide: TRBC-678
acucgucauucuccgagagcccg

SEQ ID NO: 50646 - RNA, 24 nt, Artificial Sequence
  Synthetic oligonucleotide: TRBC-679
cacucgucauucuccgagagcccg

SEQ ID NO: 50647 - RNA, 18 nt, Artificial Sequence
  Synthetic oligonucleotide: TRBC-680
uaucuggagucauugagg

SEQ ID NO: 50648 - RNA, 19 nt, Artificial Sequence
  Synthetic oligonucleotide: TRBC-681
guaucuggagucauugagg

SEQ ID NO: 50649 - RNA, 20 nt, Artificial Sequence
  Synthetic oligonucleotide: TRBC-682
aguaucuggagucauugagg

SEQ ID NO: 50650 - RNA, 21 nt, Artificial Sequence
  Synthetic oligonucleotide: TRBC-683
caguaucuggagucauugagg

SEQ ID NO: 50651 - RNA, 22 nt, Artificial Sequence
  Synthetic oligonucleotide: TRBC-684
gcaguaucuggagucauugagg

SEQ ID NO: 50652 - RNA, 23 nt, Artificial Sequence
  Synthetic oligonucleotide: TRBC-685
ggcaguaucuggagucauugagg

SEQ ID NO: 50653 - RNA, 24 nt, Artificial Sequence
  Synthetic oligonucleotide: TRBC-686
aggcaguaucuggagucauugagg

SEQ ID NO: 50654 - RNA, 18 nt, Artificial Sequence
  Synthetic oligonucleotide: TRBC-687
caaacacagcgaccucgg

SEQ ID NO: 50655 - RNA, 19 nt, Artificial Sequence
  Synthetic oligonucleotide: TRBC-688
ucaaacacagcgaccucgg

SEQ ID NO: 50656 - RNA, 20 nt, Artificial Sequence
  Synthetic oligonucleotide: TRBC-689
cucaaacacagcgaccucgg

SEQ ID NO: 50657 - RNA, 21 nt, Artificial Sequence
  Synthetic oligonucleotide: TRBC-690
gcucaaacacagcgaccucgg

SEQ ID NO: 50658 - RNA, 22 nt, Artificial Sequence
  Synthetic oligonucleotide: TRBC-691
ggcucaaacacagcgaccucgg

SEQ ID NO: 50659 - RNA, 23 nt, Artificial Sequence
  Synthetic oligonucleotide: TRBC-692
uggcucaaacacagcgaccucgg

SEQ ID NO: 50660 - RNA, 24 nt, Artificial Sequence
  Synthetic oligonucleotide: TRBC-693
auggcucaaacacagcgaccucgg

SEQ ID NO: 50661 - RNA, 18 nt, Artificial Sequence
  Synthetic oligonucleotide: TRBC-694
cagguccucuggaaaggg

SEQ ID NO: 50662 - RNA, 19 nt, Artificial Sequence
  Synthetic oligonucleotide: TRBC-695
ucagguccucuggaaaggg

SEQ ID NO: 50663 - RNA, 20 nt, Artificial Sequence
  Synthetic oligonucleotide: TRBC-696
uucagguccucuggaaaggg

SEQ ID NO: 50664 - RNA, 21 nt, Artificial Sequence
  Synthetic oligonucleotide: TRBC-697
uuucagguccucuggaaaggg

SEQ ID NO: 50665 - RNA, 22 nt, Artificial Sequence
  Synthetic oligonucleotide: TRBC-698
uuuucagguccucuggaaaggg

SEQ ID NO: 50666 - RNA, 23 nt, Artificial Sequence
  Synthetic oligonucleotide: TRBC-699
uuuuucagguccucuggaaaggg

SEQ ID NO: 50667 - RNA, 24 nt, Artificial Sequence
  Synthetic oligonucleotide: TRBC-700
guuuuucagguccucuggaaaggg

SEQ ID NO: 50668 - RNA, 18 nt, Artificial Sequence
  Synthetic oligonucleotide: TRBC-701
aaacacagcgaccucggg

SEQ ID NO: 50669 - RNA, 19 nt, Artificial Sequence
  Synthetic oligonucleotide: TRBC-702
caaacacagcgaccucggg

SEQ ID NO: 50670 - RNA, 20 nt, Artificial Sequence
  Synthetic oligonucleotide: TRBC-45
ucaaacacagcgaccucggg

SEQ ID NO: 50671 - RNA, 21 nt, Artificial Sequence
  Synthetic oligonucleotide: TRBC-703
cucaaacacagcgaccucggg

SEQ ID NO: 50672 - RNA, 22 nt, Artificial Sequence
  Synthetic oligonucleotide: TRBC-704
gcucaaacacagcgaccucggg

SEQ ID NO: 50673 - RNA, 23 nt, Artificial Sequence
  Synthetic oligonucleotide: TRBC-705
ggcucaaacacagcgaccucggg

SEQ ID NO: 50674 - RNA, 24 nt, Artificial Sequence
  Synthetic oligonucleotide: TRBC-706
uggcucaaacacagcgaccucggg

SEQ ID NO: 50675 - RNA, 18 nt, Artificial Sequence
  Synthetic oligonucleotide: TRBC-707
ucugaaagaaaacagggg

SEQ ID NO: 50676 - RNA, 19 nt, Artificial Sequence
  Synthetic oligonucleotide: TRBC-708
gucugaaagaaaacagggg

SEQ ID NO: 50677 - RNA, 20 nt, Artificial Sequence
  Synthetic oligonucleotide: TRBC-709
agucugaaagaaaacagggg

SEQ ID NO: 50678 - RNA, 21 nt, Artificial Sequence
  Synthetic oligonucleotide: TRBC-710
cagucugaaagaaaacagggg

SEQ ID NO: 50679 - RNA, 22 nt, Artificial Sequence
  Synthetic oligonucleotide: TRBC-711
acagucugaaagaaaacagggg

SEQ ID NO: 50680 - RNA, 23 nt, Artificial Sequence
  Synthetic oligonucleotide: TRBC-712
cacagucugaaagaaaacagggg

SEQ ID NO: 50681 - RNA, 24 nt, Artificial Sequence
  Synthetic oligonucleotide: TRBC-713
ccacagucugaaagaaaacagggg

SEQ ID NO: 50682 - RNA, 18 nt, Artificial Sequence
  Synthetic oligonucleotide: TRBC-714
agcuccacguggucgggg

SEQ ID NO: 50683 - RNA, 19 nt, Artificial Sequence
  Synthetic oligonucleotide: TRBC-715
cagcuccacguggucgggg

SEQ ID NO: 50684 - RNA, 20 nt, Artificial Sequence
  Synthetic oligonucleotide: TRBC-716
ucagcuccacguggucgggg

SEQ ID NO: 50685 - RNA, 21 nt, Artificial Sequence
  Synthetic oligonucleotide: TRBC-717
cucagcuccacguggucgggg

SEQ ID NO: 50686 - RNA, 22 nt, Artificial Sequence
  Synthetic oligonucleotide: TRBC-718
gcucagcuccacguggucgggg

SEQ ID NO: 50687 - RNA, 23 nt, Artificial Sequence
  Synthetic oligonucleotide: TRBC-719
agcucagcuccacguggucgggg

SEQ ID NO: 50688 - RNA, 24 nt, Artificial Sequence
  Synthetic oligonucleotide: TRBC-720
cagcucagcuccacguggucgggg

SEQ ID NO: 50689 - RNA, 18 nt, Artificial Sequence
  Synthetic oligonucleotide: TRBC-721
cagcucagcuccacgugg

SEQ ID NO: 50690 - RNA, 19 nt, Artificial Sequence
  Synthetic oligonucleotide: TRBC-722
ccagcucagcuccacgugg

SEQ ID NO: 50691 - RNA, 20 nt, Artificial Sequence
  Synthetic oligonucleotide: TRBC-723
accagcucagcuccacgugg

SEQ ID NO: 50692 - RNA, 21 nt, Artificial Sequence
  Synthetic oligonucleotide: TRBC-724
caccagcucagcuccacgugg

SEQ ID NO: 50693 - RNA, 22 nt, Artificial Sequence
  Synthetic oligonucleotide: TRBC-725
ccaccagcucagcuccacgugg

SEQ ID NO: 50694 - RNA, 23 nt, Artificial Sequence
  Synthetic oligonucleotide: TRBC-726
cccaccagcucagcuccacgugg

SEQ ID NO: 50695 - RNA, 24 nt, Artificial Sequence
  Synthetic oligonucleotide: TRBC-727
acccaccagcucagcuccacgugg

SEQ ID NO: 50696 - RNA, 18 nt, Artificial Sequence
  Synthetic oligonucleotide: TRBC-728
gguucugccagaaggugg

SEQ ID NO: 50697 - RNA, 19 nt, Artificial Sequence
  Synthetic oligonucleotide: TRBC-729
ggguucugccagaaggugg

SEQ ID NO: 50698 - RNA, 20 nt, Artificial Sequence
  Synthetic oligonucleotide: TRBC-730
gggguucugccagaaggugg

SEQ ID NO: 50699 - RNA, 21 nt, Artificial Sequence
  Synthetic oligonucleotide: TRBC-731
ggggguucugccagaaggugg

SEQ ID NO: 50700 - RNA, 22 nt, Artificial Sequence
  Synthetic oligonucleotide: TRBC-732
cggggguucugccagaaggugg

SEQ ID NO: 50701 - RNA, 23 nt, Artificial Sequence
  Synthetic oligonucleotide: TRBC-733
gcggggguucugccagaaggugg

SEQ ID NO: 50702 - RNA, 24 nt, Artificial Sequence
  Synthetic oligonucleotide: TRBC-734
ugcggggguucugccagaaggugg

SEQ ID NO: 50703 - RNA, 18 nt, Artificial Sequence
  Synthetic oligonucleotide: TRBC-735
cuuucucuugaccugugg

SEQ ID NO: 50704 - RNA, 19 nt, Artificial Sequence
  Synthetic oligonucleotide: TRBC-736
ccuuucucuugaccugugg

SEQ ID NO: 50705 - RNA, 20 nt, Artificial Sequence
  Synthetic oligonucleotide: TRBC-737
uccuuucucuugaccugugg

SEQ ID NO: 50706 - RNA, 21 nt, Artificial Sequence
  Synthetic oligonucleotide: TRBC-738
auccuuucucuugaccugugg

SEQ ID NO: 50707 - RNA, 22 nt, Artificial Sequence
  Synthetic oligonucleotide: TRBC-739
aauccuuucucuugaccugugg

SEQ ID NO: 50708 - RNA, 23 nt, Artificial Sequence
  Synthetic oligonucleotide: TRBC-740
gaauccuuucucuugaccugugg

SEQ ID NO: 50709 - RNA, 24 nt, Artificial Sequence
  Synthetic oligonucleotide: TRBC-741
ggaauccuuucucuugaccugugg

SEQ ID NO: 50710 - RNA, 18 nt, Artificial Sequence
  Synthetic oligonucleotide: TRBC-742
auccuuucucuugaccug

SEQ ID NO: 50711 - RNA, 19 nt, Artificial Sequence
  Synthetic oligonucleotide: TRBC-743
aauccuuucucuugaccug

SEQ ID NO: 50712 - RNA, 20 nt, Artificial Sequence
  Synthetic oligonucleotide: TRBC-259
gaauccuuucucuugaccug

SEQ ID NO: 50713 - RNA, 21 nt, Artificial Sequence
  Synthetic oligonucleotide: TRBC-744
ggaauccuuucucuugaccug

SEQ ID NO: 50714 - RNA, 22 nt, Artificial Sequence
  Synthetic oligonucleotide: TRBC-745
uggaauccuuucucuugaccug

SEQ ID NO: 50715 - RNA, 23 nt, Artificial Sequence
  Synthetic oligonucleotide: TRBC-746
cuggaauccuuucucuugaccug

SEQ ID NO: 50716 - RNA, 24 nt, Artificial Sequence
  Synthetic oligonucleotide: TRBC-747
ucuggaauccuuucucuugaccug

SEQ ID NO: 50717 - RNA, 18 nt, Artificial Sequence
  Synthetic oligonucleotide: TRBC-748
aguguggccuuuugggug

SEQ ID NO: 50718 - RNA, 19 nt, Artificial Sequence
  Synthetic oligonucleotide: TRBC-749
caguguggccuuuugggug

SEQ ID NO: 50719 - RNA, 20 nt, Artificial Sequence
  Synthetic oligonucleotide: TRBC-266
ccaguguggccuuuugggug

SEQ ID NO: 50720 - RNA, 21 nt, Artificial Sequence
  Synthetic oligonucleotide: TRBC-750
accaguguggccuuuugggug

SEQ ID NO: 50721 - RNA, 22 nt, Artificial Sequence
  Synthetic oligonucleotide: TRBC-751
caccaguguggccuuuugggug

SEQ ID NO: 50722 - RNA, 23 nt, Artificial Sequence
  Synthetic oligonucleotide: TRBC-752
acaccaguguggccuuuugggug

SEQ ID NO: 50723 - RNA, 24 nt, Artificial Sequence
  Synthetic oligonucleotide: TRBC-753
cacaccaguguggccuuuugggug

SEQ ID NO: 50724 - RNA, 18 nt, Artificial Sequence
  Synthetic oligonucleotide: TRBC-754
agggcgggcugcuccuug

SEQ ID NO: 50725 - RNA, 19 nt, Artificial Sequence
  Synthetic oligonucleotide: TRBC-755
gagggcgggcugcuccuug

SEQ ID NO: 50726 - RNA, 20 nt, Artificial Sequence
  Synthetic oligonucleotide: TRBC-268
ugagggcgggcugcuccuug

SEQ ID NO: 50727 - RNA, 21 nt, Artificial Sequence
  Synthetic oligonucleotide: TRBC-756
uugagggcgggcugcuccuug

SEQ ID NO: 50728 - RNA, 22 nt, Artificial Sequence
  Synthetic oligonucleotide: TRBC-757
auugagggcgggcugcuccuug

SEQ ID NO: 50729 - RNA, 23 nt, Artificial Sequence
  Synthetic oligonucleotide: TRBC-758
cauugagggcgggcugcuccuug

SEQ ID NO: 50730 - RNA, 24 nt, Artificial Sequence
  Synthetic oligonucleotide: TRBC-759
ucauugagggcgggcugcuccuug

SEQ ID NO: 50731 - RNA, 18 nt, Artificial Sequence
  Synthetic oligonucleotide: TRBC-760
ugacagcggaagugguug

SEQ ID NO: 50732 - RNA, 19 nt, Artificial Sequence
  Synthetic oligonucleotide: TRBC-761
uugacagcggaagugguug

SEQ ID NO: 50733 - RNA, 20 nt, Artificial Sequence
  Synthetic oligonucleotide: TRBC-48
cuugacagcggaagugguug

SEQ ID NO: 50734 - RNA, 21 nt, Artificial Sequence
  Synthetic oligonucleotide: TRBC-762
acuugacagcggaagugguug

SEQ ID NO: 50735 - RNA, 22 nt, Artificial Sequence
  Synthetic oligonucleotide: TRBC-763
gacuugacagcggaagugguug

SEQ ID NO: 50736 - RNA, 23 nt, Artificial Sequence
  Synthetic oligonucleotide: TRBC-764
ggacuugacagcggaagugguug

SEQ ID NO: 50737 - RNA, 24 nt, Artificial Sequence
  Synthetic oligonucleotide: TRBC-765
uggacuugacagcggaagugguug

SEQ ID NO: 50738 - RNA, 18 nt, Artificial Sequence
  Synthetic oligonucleotide: TRBC-766
cggcugcucaggcaguau

SEQ ID NO: 50739 - RNA, 19 nt, Artificial Sequence
  Synthetic oligonucleotide: TRBC-767
gcggcugcucaggcaguau

SEQ ID NO: 50740 - RNA, 20 nt, Artificial Sequence
  Synthetic oligonucleotide: TRBC-768
ggcggcugcucaggcaguau

SEQ ID NO: 50741 - RNA, 21 nt, Artificial Sequence
  Synthetic oligonucleotide: TRBC-769
aggcggcugcucaggcaguau

SEQ ID NO: 50742 - RNA, 22 nt, Artificial Sequence
  Synthetic oligonucleotide: TRBC-770
caggcggcugcucaggcaguau

SEQ ID NO: 50743 - RNA, 23 nt, Artificial Sequence
  Synthetic oligonucleotide: TRBC-771
ucaggcggcugcucaggcaguau

SEQ ID NO: 50744 - RNA, 24 nt, Artificial Sequence
  Synthetic oligonucleotide: TRBC-772
cucaggcggcugcucaggcaguau

SEQ ID NO: 50745 - RNA, 18 nt, Artificial Sequence
  Synthetic oligonucleotide: TRBC-773
aauccuuucucuugaccu

SEQ ID NO: 50746 - RNA, 19 nt, Artificial Sequence
  Synthetic oligonucleotide: TRBC-774
gaauccuuucucuugaccu

SEQ ID NO: 50747 - RNA, 20 nt, Artificial Sequence
  Synthetic oligonucleotide: TRBC-775
ggaauccuuucucuugaccu

SEQ ID NO: 50748 - RNA, 21 nt, Artificial Sequence
  Synthetic oligonucleotide: TRBC-776
uggaauccuuucucuugaccu

SEQ ID NO: 50749 - RNA, 22 nt, Artificial Sequence
  Synthetic oligonucleotide: TRBC-777
cuggaauccuuucucuugaccu

SEQ ID NO: 50750 - RNA, 23 nt, Artificial Sequence
  Synthetic oligonucleotide: TRBC-778
ucuggaauccuuucucuugaccu

SEQ ID NO: 50751 - RNA, 24 nt, Artificial Sequence
  Synthetic oligonucleotide: TRBC-779
cucuggaauccuuucucuugaccu

SEQ ID NO: 50752 - RNA, 18 nt, Artificial Sequence
  Synthetic oligonucleotide: TRBC-780
ugguuuuggagcuagccu

SEQ ID NO: 50753 - RNA, 19 nt, Artificial Sequence
  Synthetic oligonucleotide: TRBC-781
augguuuuggagcuagccu

SEQ ID NO: 50754 - RNA, 20 nt, Artificial Sequence
  Synthetic oligonucleotide: TRBC-782
gaugguuuuggagcuagccu

SEQ ID NO: 50755 - RNA, 21 nt, Artificial Sequence
  Synthetic oligonucleotide: TRBC-783
ggaugguuuuggagcuagccu

SEQ ID NO: 50756 - RNA, 22 nt, Artificial Sequence
  Synthetic oligonucleotide: TRBC-784
gggaugguuuuggagcuagccu

SEQ ID NO: 50757 - RNA, 23 nt, Artificial Sequence
  Synthetic oligonucleotide: TRBC-785
ugggaugguuuuggagcuagccu

SEQ ID NO: 50758 - RNA, 24 nt, Artificial Sequence
  Synthetic oligonucleotide: TRBC-786
cugggaugguuuuggagcuagccu

SEQ ID NO: 50759 - RNA, 18 nt, Artificial Sequence
  Synthetic oligonucleotide: TRBC-787
acacguuuuucagguccu

SEQ ID NO: 50760 - RNA, 19 nt, Artificial Sequence
  Synthetic oligonucleotide: TRBC-788
aacacguuuuucagguccu

SEQ ID NO: 50761 - RNA, 20 nt, Artificial Sequence
  Synthetic oligonucleotide: TRBC-789
gaacacguuuuucagguccu

SEQ ID NO: 50762 - RNA, 21 nt, Artificial Sequence
  Synthetic oligonucleotide: TRBC-790
ggaacacguuuuucagguccu

SEQ ID NO: 50763 - RNA, 22 nt, Artificial Sequence
  Synthetic oligonucleotide: TRBC-791
gggaacacguuuuucagguccu

SEQ ID NO: 50764 - RNA, 23 nt, Artificial Sequence
  Synthetic oligonucleotide: TRBC-792
ugggaacacguuuuucagguccu

SEQ ID NO: 50765 - RNA, 24 nt, Artificial Sequence
  Synthetic oligonucleotide: TRBC-793
gugggaacacguuuuucagguccu

SEQ ID NO: 50766 - RNA, 18 nt, Artificial Sequence
  Synthetic oligonucleotide: TRBC-794
ggguccacucgucauucu

SEQ ID NO: 50767 - RNA, 19 nt, Artificial Sequence
  Synthetic oligonucleotide: TRBC-795
uggguccacucgucauucu

SEQ ID NO: 50768 - RNA, 20 nt, Artificial Sequence
  Synthetic oligonucleotide: TRBC-796
cuggguccacucgucauucu

SEQ ID NO: 50769 - RNA, 21 nt, Artificial Sequence
  Synthetic oligonucleotide: TRBC-797
ccuggguccacucgucauucu

SEQ ID NO: 50770 - RNA, 22 nt, Artificial Sequence
  Synthetic oligonucleotide: TRBC-798
uccuggguccacucgucauucu

SEQ ID NO: 50771 - RNA, 23 nt, Artificial Sequence
  Synthetic oligonucleotide: TRBC-799
auccuggguccacucgucauucu

SEQ ID NO: 50772 - RNA, 24 nt, Artificial Sequence
  Synthetic oligonucleotide: TRBC-800
uauccuggguccacucgucauucu

SEQ ID NO: 50773 - RNA, 18 nt, Artificial Sequence
  Synthetic oligonucleotide: TRBC-801
cggaggugaagccacagu

SEQ ID NO: 50774 - RNA, 19 nt, Artificial Sequence
  Synthetic oligonucleotide: TRBC-802
ccggaggugaagccacagu

SEQ ID NO: 50775 - RNA, 20 nt, Artificial Sequence
  Synthetic oligonucleotide: TRBC-803
accggaggugaagccacagu

SEQ ID NO: 50776 - RNA, 21 nt, Artificial Sequence
  Synthetic oligonucleotide: TRBC-804
uaccggaggugaagccacagu

SEQ ID NO: 50777 - RNA, 22 nt, Artificial Sequence
  Synthetic oligonucleotide: TRBC-805
uuaccggaggugaagccacagu

SEQ ID NO: 50778 - RNA, 23 nt, Artificial Sequence
  Synthetic oligonucleotide: TRBC-806
cuuaccggaggugaagccacagu

SEQ ID NO: 50779 - RNA, 24 nt, Artificial Sequence
  Synthetic oligonucleotide: TRBC-807
acuuaccggaggugaagccacagu

SEQ ID NO: 50780 - RNA, 18 nt, Artificial Sequence
  Synthetic oligonucleotide: TRBC-808
aacacagcgaccucgggu

SEQ ID NO: 50781 - RNA, 19 nt, Artificial Sequence
  Synthetic oligonucleotide: TRBC-809
aaacacagcgaccucgggu

SEQ ID NO: 50782 - RNA, 20 nt, Artificial Sequence
  Synthetic oligonucleotide: TRBC-52
caaacacagcgaccucgggu

SEQ ID NO: 50783 - RNA, 21 nt, Artificial Sequence
  Synthetic oligonucleotide: TRBC-810
ucaaacacagcgaccucgggu

SEQ ID NO: 50784 - RNA, 22 nt, Artificial Sequence
  Synthetic oligonucleotide: TRBC-811
cucaaacacagcgaccucgggu

SEQ ID NO: 50785 - RNA, 23 nt, Artificial Sequence
  Synthetic oligonucleotide: TRBC-812
gcucaaacacagcgaccucgggu

SEQ ID NO: 50786 - RNA, 24 nt, Artificial Sequence
  Synthetic oligonucleotide: TRBC-813
ggcucaaacacagcgaccucgggu

SEQ ID NO: 50787 - RNA, 18 nt, Artificial Sequence
  Synthetic oligonucleotide: TRBC-814
caguguggccuuuugggu

SEQ ID NO: 50788 - RNA, 19 nt, Artificial Sequence
  Synthetic oligonucleotide: TRBC-815
ccaguguggccuuuugggu

SEQ ID NO: 50789 - RNA, 20 nt, Artificial Sequence
  Synthetic oligonucleotide: TRBC-816
accaguguggccuuuugggu

SEQ ID NO: 50790 - RNA, 21 nt, Artificial Sequence
  Synthetic oligonucleotide: TRBC-817
caccaguguggccuuuugggu

SEQ ID NO: 50791 - RNA, 22 nt, Artificial Sequence
  Synthetic oligonucleotide: TRBC-818
acaccaguguggccuuuugggu

SEQ ID NO: 50792 - RNA, 23 nt, Artificial Sequence
  Synthetic oligonucleotide: TRBC-819
cacaccaguguggccuuuugggu

SEQ ID NO: 50793 - RNA, 24 nt, Artificial Sequence
  Synthetic oligonucleotide: TRBC-820
gcacaccaguguggccuuuugggu

SEQ ID NO: 50794 - RNA, 18 nt, Artificial Sequence
  Synthetic oligonucleotide: TRBC-821
guguggccuuuugggugu

SEQ ID NO: 50795 - RNA, 19 nt, Artificial Sequence
  Synthetic oligonucleotide: TRBC-822
aguguggccuuuugggugu

SEQ ID NO: 50796 - RNA, 20 nt, Artificial Sequence
  Synthetic oligonucleotide: TRBC-286
caguguggccuuuugggugu

SEQ ID NO: 50797 - RNA, 21 nt, Artificial Sequence
  Synthetic oligonucleotide: TRBC-823
ccaguguggccuuuugggugu

SEQ ID NO: 50798 - RNA, 22 nt, Artificial Sequence
  Synthetic oligonucleotide: TRBC-824
accaguguggccuuuugggugu

SEQ ID NO: 50799 - RNA, 23 nt, Artificial Sequence
  Synthetic oligonucleotide: TRBC-825
caccaguguggccuuuugggugu

SEQ ID NO: 50800 - RNA, 24 nt, Artificial Sequence
  Synthetic oligonucleotide: TRBC-826
acaccaguguggccuuuugggugu

SEQ ID NO: 50801 - RNA, 18 nt, Artificial Sequence
  Synthetic oligonucleotide: TRBC-827
gcaguaucuggagucauu

SEQ ID NO: 50802 - RNA, 19 nt, Artificial Sequence
  Synthetic oligonucleotide: TRBC-828
ggcaguaucuggagucauu

SEQ ID NO: 50803 - RNA, 20 nt, Artificial Sequence
  Synthetic oligonucleotide: TRBC-829
aggcaguaucuggagucauu

SEQ ID NO: 50804 - RNA, 21 nt, Artificial Sequence
  Synthetic oligonucleotide: TRBC-830
caggcaguaucuggagucauu

SEQ ID NO: 50805 - RNA, 22 nt, Artificial Sequence
  Synthetic oligonucleotide: TRBC-831
ucaggcaguaucuggagucauu

SEQ ID NO: 50806 - RNA, 23 nt, Artificial Sequence
  Synthetic oligonucleotide: TRBC-832
cucaggcaguaucuggagucauu

SEQ ID NO: 50807 - RNA, 24 nt, Artificial Sequence
  Synthetic oligonucleotide: TRBC-833
gcucaggcaguaucuggagucauu

SEQ ID NO: 50808 - RNA, 18 nt, Artificial Sequence
  Synthetic oligonucleotide: TRBC-834
gagggcgggcugcuccuu

SEQ ID NO: 50809 - RNA, 19 nt, Artificial Sequence
  Synthetic oligonucleotide: TRBC-835
ugagggcgggcugcuccuu

SEQ ID NO: 50810 - RNA, 20 nt, Artificial Sequence
  Synthetic oligonucleotide: TRBC-836
uugagggcgggcugcuccuu

SEQ ID NO: 50811 - RNA, 21 nt, Artificial Sequence
  Synthetic oligonucleotide: TRBC-837
auugagggcgggcugcuccuu

SEQ ID NO: 50812 - RNA, 22 nt, Artificial Sequence
  Synthetic oligonucleotide: TRBC-838
cauugagggcgggcugcuccuu

SEQ ID NO: 50813 - RNA, 23 nt, Artificial Sequence
  Synthetic oligonucleotide: TRBC-839
ucauugagggcgggcugcuccuu

SEQ ID NO: 50814 - RNA, 24 nt, Artificial Sequence
  Synthetic oligonucleotide: TRBC-840
gucauugagggcgggcugcuccuu

SEQ ID NO: 50815 - RNA, 18 nt, Artificial Sequence
  Synthetic oligonucleotide: TRBC-841
gaaugaccugggaugguu

SEQ ID NO: 50816 - RNA, 19 nt, Artificial Sequence
  Synthetic oligonucleotide: TRBC-842
agaaugaccugggaugguu

SEQ ID NO: 50817 - RNA, 20 nt, Artificial Sequence
  Synthetic oligonucleotide: TRBC-843
aagaaugaccugggaugguu

SEQ ID NO: 50818 - RNA, 21 nt, Artificial Sequence
  Synthetic oligonucleotide: TRBC-844
gaagaaugaccugggaugguu

SEQ ID NO: 50819 - RNA, 22 nt, Artificial Sequence
  Synthetic oligonucleotide: TRBC-845
ugaagaaugaccugggaugguu

SEQ ID NO: 50820 - RNA, 23 nt, Artificial Sequence
  Synthetic oligonucleotide: TRBC-846
augaagaaugaccugggaugguu

SEQ ID NO: 50821 - RNA, 24 nt, Artificial Sequence
  Synthetic oligonucleotide: TRBC-847
gaugaagaaugaccugggaugguu

SEQ ID NO: 50822 - RNA, 18 nt, Artificial Sequence
  Synthetic oligonucleotide: TRBC-848
uugacagcggaagugguu

SEQ ID NO: 50823 - RNA, 19 nt, Artificial Sequence
  Synthetic oligonucleotide: TRBC-849
cuugacagcggaagugguu

SEQ ID NO: 50824 - RNA, 20 nt, Artificial Sequence
  Synthetic oligonucleotide: TRBC-850
acuugacagcggaagugguu

SEQ ID NO: 50825 - RNA, 21 nt, Artificial Sequence
  Synthetic oligonucleotide: TRBC-851
gacuugacagcggaagugguu

SEQ ID NO: 50826 - RNA, 22 nt, Artificial Sequence
  Synthetic oligonucleotide: TRBC-852
ggacuugacagcggaagugguu

SEQ ID NO: 50827 - RNA, 23 nt, Artificial Sequence
  Synthetic oligonucleotide: TRBC-853
uggacuugacagcggaagugguu

SEQ ID NO: 50828 - RNA, 24 nt, Artificial Sequence
  Synthetic oligonucleotide: TRBC-854
cuggacuugacagcggaagugguu

SEQ ID NO: 50829 - RNA, 18 nt, Artificial Sequence
  Synthetic oligonucleotide: TRBC-855
aaugaccugggaugguuu

SEQ ID NO: 50830 - RNA, 19 nt, Artificial Sequence
  Synthetic oligonucleotide: TRBC-856
gaaugaccugggaugguuu

SEQ ID NO: 50831 - RNA, 20 nt, Artificial Sequence
  Synthetic oligonucleotide: TRBC-289
agaaugaccugggaugguuu

SEQ ID NO: 50832 - RNA, 21 nt, Artificial Sequence
  Synthetic oligonucleotide: TRBC-857
aagaaugaccugggaugguuu

SEQ ID NO: 50833 - RNA, 22 nt, Artificial Sequence
  Synthetic oligonucleotide: TRBC-858
gaagaaugaccugggaugguuu

SEQ ID NO: 50834 - RNA, 23 nt, Artificial Sequence
  Synthetic oligonucleotide: TRBC-859
ugaagaaugaccugggaugguuu

SEQ ID NO: 50835 - RNA, 24 nt, Artificial Sequence
  Synthetic oligonucleotide: TRBC-860
augaagaaugaccugggaugguuu

SEQ ID NO: 50836 - RNA, 18 nt, Artificial Sequence
  Synthetic oligonucleotide: TRBC-861
cucucuuccacaggucaa

SEQ ID NO: 50837 - RNA, 19 nt, Artificial Sequence
  Synthetic oligonucleotide: TRBC-862
ucucucuuccacaggucaa

SEQ ID NO: 50838 - RNA, 20 nt, Artificial Sequence
  Synthetic oligonucleotide: TRBC-863
uucucucuuccacaggucaa

SEQ ID NO: 50839 - RNA, 21 nt, Artificial Sequence
  Synthetic oligonucleotide: TRBC-864
guucucucuuccacaggucaa

SEQ ID NO: 50840 - RNA, 22 nt, Artificial Sequence
  Synthetic oligonucleotide: TRBC-865
uguucucucuuccacaggucaa

SEQ ID NO: 50841 - RNA, 23 nt, Artificial Sequence
  Synthetic oligonucleotide: TRBC-866
auguucucucuuccacaggucaa

SEQ ID NO: 50842 - RNA, 24 nt, Artificial Sequence
  Synthetic oligonucleotide: TRBC-867
aauguucucucuuccacaggucaa

SEQ ID NO: 50843 - RNA, 18 nt, Artificial Sequence
  Synthetic oligonucleotide: TRBC-868
gcugagcuggugggugaa

SEQ ID NO: 50844 - RNA, 19 nt, Artificial Sequence
  Synthetic oligonucleotide: TRBC-869
agcugagcuggugggugaa

SEQ ID NO: 50845 - RNA, 20 nt, Artificial Sequence
  Synthetic oligonucleotide: TRBC-186
gagcugagcuggugggugaa

SEQ ID NO: 50846 - RNA, 21 nt, Artificial Sequence
  Synthetic oligonucleotide: TRBC-870
ggagcugagcuggugggugaa

SEQ ID NO: 50847 - RNA, 22 nt, Artificial Sequence
  Synthetic oligonucleotide: TRBC-871
uggagcugagcuggugggugaa

SEQ ID NO: 50848 - RNA, 23 nt, Artificial Sequence
  Synthetic oligonucleotide: TRBC-872
guggagcugagcuggugggugaa

SEQ ID NO: 50849 - RNA, 24 nt, Artificial Sequence
  Synthetic oligonucleotide: TRBC-873
cguggagcugagcuggugggugaa

SEQ ID NO: 50850 - RNA, 18 nt, Artificial Sequence
  Synthetic oligonucleotide: TRBC-874
augggaaggaggugcaca

SEQ ID NO: 50851 - RNA, 19 nt, Artificial Sequence
  Synthetic oligonucleotide: TRBC-875
aaugggaaggaggugcaca

SEQ ID NO: 50852 - RNA, 20 nt, Artificial Sequence
  Synthetic oligonucleotide: TRBC-876
gaaugggaaggaggugcaca

SEQ ID NO: 50853 - RNA, 21 nt, Artificial Sequence
  Synthetic oligonucleotide: TRBC-877
ugaaugggaaggaggugcaca

SEQ ID NO: 50854 - RNA, 22 nt, Artificial Sequence
  Synthetic oligonucleotide: TRBC-878
gugaaugggaaggaggugcaca

SEQ ID NO: 50855 - RNA, 23 nt, Artificial Sequence
  Synthetic oligonucleotide: TRBC-879
ggugaaugggaaggaggugcaca

SEQ ID NO: 50856 - RNA, 24 nt, Artificial Sequence
  Synthetic oligonucleotide: TRBC-880
gggugaaugggaaggaggugcaca

SEQ ID NO: 50857 - RNA, 18 nt, Artificial Sequence
  Synthetic oligonucleotide: TRBC-881
uuaccucuucccuuucca

SEQ ID NO: 50858 - RNA, 19 nt, Artificial Sequence
  Synthetic oligonucleotide: TRBC-882
auuaccucuucccuuucca

SEQ ID NO: 50859 - RNA, 20 nt, Artificial Sequence
  Synthetic oligonucleotide: TRBC-883
cauuaccucuucccuuucca

SEQ ID NO: 50860 - RNA, 21 nt, Artificial Sequence
  Synthetic oligonucleotide: TRBC-884
ccauuaccucuucccuuucca

SEQ ID NO: 50861 - RNA, 22 nt, Artificial Sequence
  Synthetic oligonucleotide: TRBC-885
cccauuaccucuucccuuucca

SEQ ID NO: 50862 - RNA, 23 nt, Artificial Sequence
  Synthetic oligonucleotide: TRBC-886
ccccauuaccucuucccuuucca

SEQ ID NO: 50863 - RNA, 24 nt, Artificial Sequence
  Synthetic oligonucleotide: TRBC-887
gccccauuaccucuucccuuucca

SEQ ID NO: 50864 - RNA, 18 nt, Artificial Sequence
  Synthetic oligonucleotide: TRBC-888
cagacccgcagccccuca

SEQ ID NO: 50865 - RNA, 19 nt, Artificial Sequence
  Synthetic oligonucleotide: TRBC-889
acagacccgcagccccuca

SEQ ID NO: 50866 - RNA, 20 nt, Artificial Sequence
  Synthetic oligonucleotide: TRBC-191
cacagacccgcagccccuca

SEQ ID NO: 50867 - RNA, 21 nt, Artificial Sequence
  Synthetic oligonucleotide: TRBC-890
gcacagacccgcagccccuca

SEQ ID NO: 50868 - RNA, 22 nt, Artificial Sequence
  Synthetic oligonucleotide: TRBC-891
agcacagacccgcagccccuca

SEQ ID NO: 50869 - RNA, 23 nt, Artificial Sequence
  Synthetic oligonucleotide: TRBC-892
cagcacagacccgcagccccuca

SEQ ID NO: 50870 - RNA, 24 nt, Artificial Sequence
  Synthetic oligonucleotide: TRBC-893
ucagcacagacccgcagccccuca

SEQ ID NO: 50871 - RNA, 18 nt, Artificial Sequence
  Synthetic oligonucleotide: TRBC-894
gcucucggagaaugacga

SEQ ID NO: 50872 - RNA, 19 nt, Artificial Sequence
  Synthetic oligonucleotide: TRBC-895
ggcucucggagaaugacga

SEQ ID NO: 50873 - RNA, 20 nt, Artificial Sequence
  Synthetic oligonucleotide: TRBC-896
gggcucucggagaaugacga

SEQ ID NO: 50874 - RNA, 21 nt, Artificial Sequence
  Synthetic oligonucleotide: TRBC-897
cgggcucucggagaaugacga

SEQ ID NO: 50875 - RNA, 22 nt, Artificial Sequence
  Synthetic oligonucleotide: TRBC-898
acgggcucucggagaaugacga

SEQ ID NO: 50876 - RNA, 23 nt, Artificial Sequence
  Synthetic oligonucleotide: TRBC-899
uacgggcucucggagaaugacga

SEQ ID NO: 50877 - RNA, 24 nt, Artificial Sequence
  Synthetic oligonucleotide: TRBC-900
cuacgggcucucggagaaugacga

SEQ ID NO: 50878 - RNA, 18 nt, Artificial Sequence
  Synthetic oligonucleotide: TRBC-901
ugacgaguggacccagga

SEQ ID NO: 50879 - RNA, 19 nt, Artificial Sequence
  Synthetic oligonucleotide: TRBC-902
augacgaguggacccagga

SEQ ID NO: 50880 - RNA, 20 nt, Artificial Sequence
  Synthetic oligonucleotide: TRBC-903
aaugacgaguggacccagga

SEQ ID NO: 50881 - RNA, 21 nt, Artificial Sequence
  Synthetic oligonucleotide: TRBC-904
gaaugacgaguggacccagga

SEQ ID NO: 50882 - RNA, 22 nt, Artificial Sequence
  Synthetic oligonucleotide: TRBC-905
agaaugacgaguggacccagga

SEQ ID NO: 50883 - RNA, 23 nt, Artificial Sequence
  Synthetic oligonucleotide: TRBC-906
gagaaugacgaguggacccagga

SEQ ID NO: 50884 - RNA, 24 nt, Artificial Sequence
  Synthetic oligonucleotide: TRBC-907
ggagaaugacgaguggacccagga

SEQ ID NO: 50885 - RNA, 18 nt, Artificial Sequence
  Synthetic oligonucleotide: TRBC-908
gcuggugggugaauggga

SEQ ID NO: 50886 - RNA, 19 nt, Artificial Sequence
  Synthetic oligonucleotide: TRBC-909
agcuggugggugaauggga

SEQ ID NO: 50887 - RNA, 20 nt, Artificial Sequence
  Synthetic oligonucleotide: TRBC-197
gagcuggugggugaauggga

SEQ ID NO: 50888 - RNA, 21 nt, Artificial Sequence
  Synthetic oligonucleotide: TRBC-910
ugagcuggugggugaauggga

SEQ ID NO: 50889 - RNA, 22 nt, Artificial Sequence
  Synthetic oligonucleotide: TRBC-911
cugagcuggugggugaauggga

SEQ ID NO: 50890 - RNA, 23 nt, Artificial Sequence
  Synthetic oligonucleotide: TRBC-912
gcugagcuggugggugaauggga

SEQ ID NO: 50891 - RNA, 24 nt, Artificial Sequence
  Synthetic oligonucleotide: TRBC-913
agcugagcuggugggugaauggga

SEQ ID NO: 50892 - RNA, 18 nt, Artificial Sequence
  Synthetic oligonucleotide: TRBC-914
guaaggaggaggguggga

SEQ ID NO: 50893 - RNA, 19 nt, Artificial Sequence
  Synthetic oligonucleotide: TRBC-915
gguaaggaggaggguggga

SEQ ID NO: 50894 - RNA, 20 nt, Artificial Sequence
  Synthetic oligonucleotide: TRBC-916
ugguaaggaggaggguggga

SEQ ID NO: 50895 - RNA, 21 nt, Artificial Sequence
  Synthetic oligonucleotide: TRBC-917
augguaaggaggaggguggga

SEQ ID NO: 50896 - RNA, 22 nt, Artificial Sequence
  Synthetic oligonucleotide: TRBC-918
caugguaaggaggaggguggga

SEQ ID NO: 50897 - RNA, 23 nt, Artificial Sequence
  Synthetic oligonucleotide: TRBC-919
ccaugguaaggaggaggguggga

SEQ ID NO: 50898 - RNA, 24 nt, Artificial Sequence
  Synthetic oligonucleotide: TRBC-920
gccaugguaaggaggaggguggga

SEQ ID NO: 50899 - RNA, 18 nt, Artificial Sequence
  Synthetic oligonucleotide: TRBC-921
cugggguagagcagguga

SEQ ID NO: 50900 - RNA, 19 nt, Artificial Sequence
  Synthetic oligonucleotide: TRBC-922
ccugggguagagcagguga

SEQ ID NO: 50901 - RNA, 20 nt, Artificial Sequence
  Synthetic oligonucleotide: TRBC-923
gccugggguagagcagguga

SEQ ID NO: 50902 - RNA, 21 nt, Artificial Sequence
  Synthetic oligonucleotide: TRBC-924
ggccugggguagagcagguga

SEQ ID NO: 50903 - RNA, 22 nt, Artificial Sequence
  Synthetic oligonucleotide: TRBC-925
aggccugggguagagcagguga

SEQ ID NO: 50904 - RNA, 23 nt, Artificial Sequence
  Synthetic oligonucleotide: TRBC-926
gaggccugggguagagcagguga

SEQ ID NO: 50905 - RNA, 24 nt, Artificial Sequence
  Synthetic oligonucleotide: TRBC-927
cgaggccugggguagagcagguga

SEQ ID NO: 50906 - RNA, 18 nt, Artificial Sequence
  Synthetic oligonucleotide: TRBC-928
agcugagcugguggguga

SEQ ID NO: 50907 - RNA, 19 nt, Artificial Sequence
  Synthetic oligonucleotide: TRBC-929
gagcugagcugguggguga

SEQ ID NO: 50908 - RNA, 20 nt, Artificial Sequence
  Synthetic oligonucleotide: TRBC-930
ggagcugagcugguggguga

SEQ ID NO: 50909 - RNA, 21 nt, Artificial Sequence
  Synthetic oligonucleotide: TRBC-931
uggagcugagcugguggguga

SEQ ID NO: 50910 - RNA, 22 nt, Artificial Sequence
  Synthetic oligonucleotide: TRBC-932
guggagcugagcugguggguga

SEQ ID NO: 50911 - RNA, 23 nt, Artificial Sequence
  Synthetic oligonucleotide: TRBC-933
cguggagcugagcugguggguga

SEQ ID NO: 50912 - RNA, 24 nt, Artificial Sequence
  Synthetic oligonucleotide: TRBC-934
acguggagcugagcugguggguga

SEQ ID NO: 50913 - RNA, 18 nt, Artificial Sequence
  Synthetic oligonucleotide: TRBC-935
cucuaugagaucuugcua

SEQ ID NO: 50914 - RNA, 19 nt, Artificial Sequence
  Synthetic oligonucleotide: TRBC-936
ccucuaugagaucuugcua

SEQ ID NO: 50915 - RNA, 20 nt, Artificial Sequence
  Synthetic oligonucleotide: TRBC-204
uccucuaugagaucuugcua

SEQ ID NO: 50916 - RNA, 21 nt, Artificial Sequence
  Synthetic oligonucleotide: TRBC-937
auccucuaugagaucuugcua

SEQ ID NO: 50917 - RNA, 22 nt, Artificial Sequence
  Synthetic oligonucleotide: TRBC-938
cauccucuaugagaucuugcua

SEQ ID NO: 50918 - RNA, 23 nt, Artificial Sequence
  Synthetic oligonucleotide: TRBC-939
ccauccucuaugagaucuugcua

SEQ ID NO: 50919 - RNA, 24 nt, Artificial Sequence
  Synthetic oligonucleotide: TRBC-940
accauccucuaugagaucuugcua

SEQ ID NO: 50920 - RNA, 18 nt, Artificial Sequence
  Synthetic oligonucleotide: TRBC-941
gugcugauggccauggua

SEQ ID NO: 50921 - RNA, 19 nt, Artificial Sequence
  Synthetic oligonucleotide: TRBC-942
cgugcugauggccauggua

SEQ ID NO: 50922 - RNA, 20 nt, Artificial Sequence
  Synthetic oligonucleotide: TRBC-27
ucgugcugauggccauggua

SEQ ID NO: 50923 - RNA, 21 nt, Artificial Sequence
  Synthetic oligonucleotide: TRBC-943
cucgugcugauggccauggua

SEQ ID NO: 50924 - RNA, 22 nt, Artificial Sequence
  Synthetic oligonucleotide: TRBC-944
ccucgugcugauggccauggua

SEQ ID NO: 50925 - RNA, 23 nt, Artificial Sequence
  Synthetic oligonucleotide: TRBC-945
cccucgugcugauggccauggua

SEQ ID NO: 50926 - RNA, 24 nt, Artificial Sequence
  Synthetic oligonucleotide: TRBC-946
gcccucgugcugauggccauggua

SEQ ID NO: 50927 - RNA, 18 nt, Artificial Sequence
  Synthetic oligonucleotide: TRBC-947
ggcuucuaccccgaccac

SEQ ID NO: 50928 - RNA, 19 nt, Artificial Sequence
  Synthetic oligonucleotide: TRBC-948
aggcuucuaccccgaccac

SEQ ID NO: 50929 - RNA, 20 nt, Artificial Sequence
  Synthetic oligonucleotide: TRBC-949
caggcuucuaccccgaccac

SEQ ID NO: 50930 - RNA, 21 nt, Artificial Sequence
  Synthetic oligonucleotide: TRBC-950
acaggcuucuaccccgaccac

SEQ ID NO: 50931 - RNA, 22 nt, Artificial Sequence
  Synthetic oligonucleotide: TRBC-951
cacaggcuucuaccccgaccac

SEQ ID NO: 50932 - RNA, 23 nt, Artificial Sequence
  Synthetic oligonucleotide: TRBC-952
ccacaggcuucuaccccgaccac

SEQ ID NO: 50933 - RNA, 24 nt, Artificial Sequence
  Synthetic oligonucleotide: TRBC-953
gccacaggcuucuaccccgaccac

SEQ ID NO: 50934 - RNA, 18 nt, Artificial Sequence
  Synthetic oligonucleotide: TRBC-954
ugaaaaacguguucccac

SEQ ID NO: 50935 - RNA, 19 nt, Artificial Sequence
  Synthetic oligonucleotide: TRBC-955
cugaaaaacguguucccac

SEQ ID NO: 50936 - RNA, 20 nt, Artificial Sequence
  Synthetic oligonucleotide: TRBC-956
ccugaaaaacguguucccac

SEQ ID NO: 50937 - RNA, 21 nt, Artificial Sequence
  Synthetic oligonucleotide: TRBC-957
accugaaaaacguguucccac

SEQ ID NO: 50938 - RNA, 22 nt, Artificial Sequence
  Synthetic oligonucleotide: TRBC-958
gaccugaaaaacguguucccac

SEQ ID NO: 50939 - RNA, 23 nt, Artificial Sequence
  Synthetic oligonucleotide: TRBC-959
ggaccugaaaaacguguucccac

SEQ ID NO: 50940 - RNA, 24 nt, Artificial Sequence
  Synthetic oligonucleotide: TRBC-960
aggaccugaaaaacguguucccac

SEQ ID NO: 50941 - RNA, 18 nt, Artificial Sequence
  Synthetic oligonucleotide: TRBC-961
cuucccuuuccagaggac

SEQ ID NO: 50942 - RNA, 19 nt, Artificial Sequence
  Synthetic oligonucleotide: TRBC-962
ucuucccuuuccagaggac

SEQ ID NO: 50943 - RNA, 20 nt, Artificial Sequence
  Synthetic oligonucleotide: TRBC-963
cucuucccuuuccagaggac

SEQ ID NO: 50944 - RNA, 21 nt, Artificial Sequence
  Synthetic oligonucleotide: TRBC-964
ccucuucccuuuccagaggac

SEQ ID NO: 50945 - RNA, 22 nt, Artificial Sequence
  Synthetic oligonucleotide: TRBC-965
accucuucccuuuccagaggac

SEQ ID NO: 50946 - RNA, 23 nt, Artificial Sequence
  Synthetic oligonucleotide: TRBC-966
uaccucuucccuuuccagaggac

SEQ ID NO: 50947 - RNA, 24 nt, Artificial Sequence
  Synthetic oligonucleotide: TRBC-967
uuaccucuucccuuuccagaggac

SEQ ID NO: 50948 - RNA, 18 nt, Artificial Sequence
  Synthetic oligonucleotide: TRBC-968
gagcaggugaguggggcc

SEQ ID NO: 50949 - RNA, 19 nt, Artificial Sequence
  Synthetic oligonucleotide: TRBC-969
agagcaggugaguggggcc

SEQ ID NO: 50950 - RNA, 20 nt, Artificial Sequence
  Synthetic oligonucleotide: TRBC-217
uagagcaggugaguggggcc

SEQ ID NO: 50951 - RNA, 21 nt, Artificial Sequence
  Synthetic oligonucleotide: TRBC-970
guagagcaggugaguggggcc

SEQ ID NO: 50952 - RNA, 22 nt, Artificial Sequence
  Synthetic oligonucleotide: TRBC-971
gguagagcaggugaguggggcc

SEQ ID NO: 50953 - RNA, 23 nt, Artificial Sequence
  Synthetic oligonucleotide: TRBC-972
ggguagagcaggugaguggggcc

SEQ ID NO: 50954 - RNA, 24 nt, Artificial Sequence
  Synthetic oligonucleotide: TRBC-973
gggguagagcaggugaguggggcc

SEQ ID NO: 50955 - RNA, 18 nt, Artificial Sequence
  Synthetic oligonucleotide: TRBC-974
ggggccuggggagaugcc

SEQ ID NO: 50956 - RNA, 19 nt, Artificial Sequence
  Synthetic oligonucleotide: TRBC-975
uggggccuggggagaugcc

SEQ ID NO: 50957 - RNA, 20 nt, Artificial Sequence
  Synthetic oligonucleotide: TRBC-219
guggggccuggggagaugcc

SEQ ID NO: 50958 - RNA, 21 nt, Artificial Sequence
  Synthetic oligonucleotide: TRBC-976
aguggggccuggggagaugcc

SEQ ID NO: 50959 - RNA, 22 nt, Artificial Sequence
  Synthetic oligonucleotide: TRBC-977
gaguggggccuggggagaugcc

SEQ ID NO: 50960 - RNA, 23 nt, Artificial Sequence
  Synthetic oligonucleotide: TRBC-978
ugaguggggccuggggagaugcc

SEQ ID NO: 50961 - RNA, 24 nt, Artificial Sequence
  Synthetic oligonucleotide: TRBC-979
gugaguggggccuggggagaugcc

SEQ ID NO: 50962 - RNA, 18 nt, Artificial Sequence
  Synthetic oligonucleotide: TRBC-980
caacagagucuuaccagc

SEQ ID NO: 50963 - RNA, 19 nt, Artificial Sequence
  Synthetic oligonucleotide: TRBC-981
ucaacagagucuuaccagc

SEQ ID NO: 50964 - RNA, 20 nt, Artificial Sequence
  Synthetic oligonucleotide: TRBC-982
gucaacagagucuuaccagc

SEQ ID NO: 50965 - RNA, 21 nt, Artificial Sequence
  Synthetic oligonucleotide: TRBC-983
ugucaacagagucuuaccagc

SEQ ID NO: 50966 - RNA, 22 nt, Artificial Sequence
  Synthetic oligonucleotide: TRBC-984
uugucaacagagucuuaccagc

SEQ ID NO: 50967 - RNA, 23 nt, Artificial Sequence
  Synthetic oligonucleotide: TRBC-985
cuugucaacagagucuuaccagc

SEQ ID NO: 50968 - RNA, 24 nt, Artificial Sequence
  Synthetic oligonucleotide: TRBC-986
ucuugucaacagagucuuaccagc

SEQ ID NO: 50969 - RNA, 18 nt, Artificial Sequence
  Synthetic oligonucleotide: TRBC-987
uacugccugagcagccgc

SEQ ID NO: 50970 - RNA, 19 nt, Artificial Sequence
  Synthetic oligonucleotide: TRBC-988
auacugccugagcagccgc

SEQ ID NO: 50971 - RNA, 20 nt, Artificial Sequence
  Synthetic oligonucleotide: TRBC-989
gauacugccugagcagccgc

SEQ ID NO: 50972 - RNA, 21 nt, Artificial Sequence
  Synthetic oligonucleotide: TRBC-990
agauacugccugagcagccgc

SEQ ID NO: 50973 - RNA, 22 nt, Artificial Sequence
  Synthetic oligonucleotide: TRBC-991
cagauacugccugagcagccgc

SEQ ID NO: 50974 - RNA, 23 nt, Artificial Sequence
  Synthetic oligonucleotide: TRBC-992
ccagauacugccugagcagccgc

SEQ ID NO: 50975 - RNA, 24 nt, Artificial Sequence
  Synthetic oligonucleotide: TRBC-993
uccagauacugccugagcagccgc

SEQ ID NO: 50976 - RNA, 18 nt, Artificial Sequence
  Synthetic oligonucleotide: TRBC-994
gaucgucagcgccgaggc

SEQ ID NO: 50977 - RNA, 19 nt, Artificial Sequence
  Synthetic oligonucleotide: TRBC-995
agaucgucagcgccgaggc

SEQ ID NO: 50978 - RNA, 20 nt, Artificial Sequence
  Synthetic oligonucleotide: TRBC-996
cagaucgucagcgccgaggc

SEQ ID NO: 50979 - RNA, 21 nt, Artificial Sequence
  Synthetic oligonucleotide: TRBC-997
ccagaucgucagcgccgaggc

SEQ ID NO: 50980 - RNA, 22 nt, Artificial Sequence
  Synthetic oligonucleotide: TRBC-998
cccagaucgucagcgccgaggc

SEQ ID NO: 50981 - RNA, 23 nt, Artificial Sequence
  Synthetic oligonucleotide: TRBC-999
acccagaucgucagcgccgaggc

SEQ ID NO: 50982 - RNA, 24 nt, Artificial Sequence
  Synthetic oligonucleotide: TRBC-1000
cacccagaucgucagcgccgaggc

SEQ ID NO: 50983 - RNA, 18 nt, Artificial Sequence
  Synthetic oligonucleotide: TRBC-1001
agagcaggugaguggggc

SEQ ID NO: 50984 - RNA, 19 nt, Artificial Sequence
  Synthetic oligonucleotide: TRBC-1002
uagagcaggugaguggggc

SEQ ID NO: 50985 - RNA, 20 nt, Artificial Sequence
  Synthetic oligonucleotide: TRBC-1003
guagagcaggugaguggggc

SEQ ID NO: 50986 - RNA, 21 nt, Artificial Sequence
  Synthetic oligonucleotide: TRBC-1004
gguagagcaggugaguggggc

SEQ ID NO: 50987 - RNA, 22 nt, Artificial Sequence
  Synthetic oligonucleotide: TRBC-1005
ggguagagcaggugaguggggc

SEQ ID NO: 50988 - RNA, 23 nt, Artificial Sequence
  Synthetic oligonucleotide: TRBC-1006
gggguagagcaggugaguggggc

SEQ ID NO: 50989 - RNA, 24 nt, Artificial Sequence
  Synthetic oligonucleotide: TRBC-1007
ugggguagagcaggugaguggggc

SEQ ID NO: 50990 - RNA, 18 nt, Artificial Sequence
  Synthetic oligonucleotide: TRBC-1008
uggggccuggggagaugc

SEQ ID NO: 50991 - RNA, 19 nt, Artificial Sequence
  Synthetic oligonucleotide: TRBC-1009
guggggccuggggagaugc

SEQ ID NO: 50992 - RNA, 20 nt, Artificial Sequence
  Synthetic oligonucleotide: TRBC-1010
aguggggccuggggagaugc

SEQ ID NO: 50993 - RNA, 21 nt, Artificial Sequence
  Synthetic oligonucleotide: TRBC-1011
gaguggggccuggggagaugc

SEQ ID NO: 50994 - RNA, 22 nt, Artificial Sequence
  Synthetic oligonucleotide: TRBC-1012
ugaguggggccuggggagaugc

SEQ ID NO: 50995 - RNA, 23 nt, Artificial Sequence
  Synthetic oligonucleotide: TRBC-1013
gugaguggggccuggggagaugc

SEQ ID NO: 50996 - RNA, 24 nt, Artificial Sequence
  Synthetic oligonucleotide: TRBC-1014
ggugaguggggccuggggagaugc

SEQ ID NO: 50997 - RNA, 18 nt, Artificial Sequence
  Synthetic oligonucleotide: TRBC-1015
aaugacuccagauacugc

SEQ ID NO: 50998 - RNA, 19 nt, Artificial Sequence
  Synthetic oligonucleotide: TRBC-1016
caaugacuccagauacugc

SEQ ID NO: 50999 - RNA, 20 nt, Artificial Sequence
  Synthetic oligonucleotide: TRBC-1017
ucaaugacuccagauacugc

SEQ ID NO: 51000 - RNA, 21 nt, Artificial Sequence
  Synthetic oligonucleotide: TRBC-1018
cucaaugacuccagauacugc

SEQ ID NO: 51001 - RNA, 22 nt, Artificial Sequence
  Synthetic oligonucleotide: TRBC-1019
ccucaaugacuccagauacugc

SEQ ID NO: 51002 - RNA, 23 nt, Artificial Sequence
  Synthetic oligonucleotide: TRBC-1020
cccucaaugacuccagauacugc

SEQ ID NO: 51003 - RNA, 24 nt, Artificial Sequence
  Synthetic oligonucleotide: TRBC-1021
gcccucaaugacuccagauacugc

SEQ ID NO: 51004 - RNA, 18 nt, Artificial Sequence
  Synthetic oligonucleotide: TRBC-1022
uccucuaugagaucuugc

SEQ ID NO: 51005 - RNA, 19 nt, Artificial Sequence
  Synthetic oligonucleotide: TRBC-1023
auccucuaugagaucuugc

SEQ ID NO: 51006 - RNA, 20 nt, Artificial Sequence
  Synthetic oligonucleotide: TRBC-1024
cauccucuaugagaucuugc

SEQ ID NO: 51007 - RNA, 21 nt, Artificial Sequence
  Synthetic oligonucleotide: TRBC-1025
ccauccucuaugagaucuugc

SEQ ID NO: 51008 - RNA, 22 nt, Artificial Sequence
  Synthetic oligonucleotide: TRBC-1026
accauccucuaugagaucuugc

SEQ ID NO: 51009 - RNA, 23 nt, Artificial Sequence
  Synthetic oligonucleotide: TRBC-1027
caccauccucuaugagaucuugc

SEQ ID NO: 51010 - RNA, 24 nt, Artificial Sequence
  Synthetic oligonucleotide: TRBC-1028
ccaccauccucuaugagaucuugc

SEQ ID NO: 51011 - RNA, 18 nt, Artificial Sequence
  Synthetic oligonucleotide: TRBC-1029
acagacccgcagccccuc

SEQ ID NO: 51012 - RNA, 19 nt, Artificial Sequence
  Synthetic oligonucleotide: TRBC-1030
cacagacccgcagccccuc

SEQ ID NO: 51013 - RNA, 20 nt, Artificial Sequence
  Synthetic oligonucleotide: TRBC-1031
gcacagacccgcagccccuc

SEQ ID NO: 51014 - RNA, 21 nt, Artificial Sequence
  Synthetic oligonucleotide: TRBC-1032
agcacagacccgcagccccuc

SEQ ID NO: 51015 - RNA, 22 nt, Artificial Sequence
  Synthetic oligonucleotide: TRBC-1033
cagcacagacccgcagccccuc

SEQ ID NO: 51016 - RNA, 23 nt, Artificial Sequence
  Synthetic oligonucleotide: TRBC-1034
ucagcacagacccgcagccccuc

SEQ ID NO: 51017 - RNA, 24 nt, Artificial Sequence
  Synthetic oligonucleotide: TRBC-1035
gucagcacagacccgcagccccuc

SEQ ID NO: 51018 - RNA, 18 nt, Artificial Sequence
  Synthetic oligonucleotide: TRBC-1036
guccaguucuacgggcuc

SEQ ID NO: 51019 - RNA, 19 nt, Artificial Sequence
  Synthetic oligonucleotide: TRBC-1037
aguccaguucuacgggcuc

SEQ ID NO: 51020 - RNA, 20 nt, Artificial Sequence
  Synthetic oligonucleotide: TRBC-1038
aaguccaguucuacgggcuc

SEQ ID NO: 51021 - RNA, 21 nt, Artificial Sequence
  Synthetic oligonucleotide: TRBC-1039
caaguccaguucuacgggcuc

SEQ ID NO: 51022 - RNA, 22 nt, Artificial Sequence
  Synthetic oligonucleotide: TRBC-1040
ucaaguccaguucuacgggcuc

SEQ ID NO: 51023 - RNA, 23 nt, Artificial Sequence
  Synthetic oligonucleotide: TRBC-1041
gucaaguccaguucuacgggcuc

SEQ ID NO: 51024 - RNA, 24 nt, Artificial Sequence
  Synthetic oligonucleotide: TRBC-1042
ugucaaguccaguucuacgggcuc

SEQ ID NO: 51025 - RNA, 18 nt, Artificial Sequence
  Synthetic oligonucleotide: TRBC-1043
uucucucuuccacagguc

SEQ ID NO: 51026 - RNA, 19 nt, Artificial Sequence
  Synthetic oligonucleotide: TRBC-1044
guucucucuuccacagguc

SEQ ID NO: 51027 - RNA, 20 nt, Artificial Sequence
  Synthetic oligonucleotide: TRBC-1045
uguucucucuuccacagguc

SEQ ID NO: 51028 - RNA, 21 nt, Artificial Sequence
  Synthetic oligonucleotide: TRBC-1046
auguucucucuuccacagguc

SEQ ID NO: 51029 - RNA, 22 nt, Artificial Sequence
  Synthetic oligonucleotide: TRBC-1047
aauguucucucuuccacagguc

SEQ ID NO: 51030 - RNA, 23 nt, Artificial Sequence
  Synthetic oligonucleotide: TRBC-1048
aaauguucucucuuccacagguc

SEQ ID NO: 51031 - RNA, 24 nt, Artificial Sequence
  Synthetic oligonucleotide: TRBC-1049
aaaauguucucucuuccacagguc

SEQ ID NO: 51032 - RNA, 18 nt, Artificial Sequence
  Synthetic oligonucleotide: TRBC-1050
ggucaagagaaaggauuc

SEQ ID NO: 51033 - RNA, 19 nt, Artificial Sequence
  Synthetic oligonucleotide: TRBC-1051
aggucaagagaaaggauuc

SEQ ID NO: 51034 - RNA, 20 nt, Artificial Sequence
  Synthetic oligonucleotide: TRBC-1052
caggucaagagaaaggauuc

SEQ ID NO: 51035 - RNA, 21 nt, Artificial Sequence
  Synthetic oligonucleotide: TRBC-1053
acaggucaagagaaaggauuc

SEQ ID NO: 51036 - RNA, 22 nt, Artificial Sequence
  Synthetic oligonucleotide: TRBC-1054
cacaggucaagagaaaggauuc

SEQ ID NO: 51037 - RNA, 23 nt, Artificial Sequence
  Synthetic oligonucleotide: TRBC-1055
ccacaggucaagagaaaggauuc

SEQ ID NO: 51038 - RNA, 24 nt, Artificial Sequence
  Synthetic oligonucleotide: TRBC-1056
uccacaggucaagagaaaggauuc

SEQ ID NO: 51039 - RNA, 18 nt, Artificial Sequence
  Synthetic oligonucleotide: TRBC-1057
cauuaccucuucccuuuc

SEQ ID NO: 51040 - RNA, 19 nt, Artificial Sequence
  Synthetic oligonucleotide: TRBC-1058
ccauuaccucuucccuuuc

SEQ ID NO: 51041 - RNA, 20 nt, Artificial Sequence
  Synthetic oligonucleotide: TRBC-1059
cccauuaccucuucccuuuc

SEQ ID NO: 51042 - RNA, 21 nt, Artificial Sequence
  Synthetic oligonucleotide: TRBC-1060
ccccauuaccucuucccuuuc

SEQ ID NO: 51043 - RNA, 22 nt, Artificial Sequence
  Synthetic oligonucleotide: TRBC-1061
gccccauuaccucuucccuuuc

SEQ ID NO: 51044 - RNA, 23 nt, Artificial Sequence
  Synthetic oligonucleotide: TRBC-1062
agccccauuaccucuucccuuuc

SEQ ID NO: 51045 - RNA, 24 nt, Artificial Sequence
  Synthetic oligonucleotide: TRBC-1063
uagccccauuaccucuucccuuuc

SEQ ID NO: 51046 - RNA, 18 nt, Artificial Sequence
  Synthetic oligonucleotide: TRBC-1064
uguuugagccaucagaag

SEQ ID NO: 51047 - RNA, 19 nt, Artificial Sequence
  Synthetic oligonucleotide: TRBC-1065
guguuugagccaucagaag

SEQ ID NO: 51048 - RNA, 20 nt, Artificial Sequence
  Synthetic oligonucleotide: TRBC-1066
uguguuugagccaucagaag

SEQ ID NO: 51049 - RNA, 21 nt, Artificial Sequence
  Synthetic oligonucleotide: TRBC-1067
cuguguuugagccaucagaag

SEQ ID NO: 51050 - RNA, 22 nt, Artificial Sequence
  Synthetic oligonucleotide: TRBC-1068
gcuguguuugagccaucagaag

SEQ ID NO: 51051 - RNA, 23 nt, Artificial Sequence
  Synthetic oligonucleotide: TRBC-1069
cgcuguguuugagccaucagaag

SEQ ID NO: 51052 - RNA, 24 nt, Artificial Sequence
  Synthetic oligonucleotide: TRBC-1070
ucgcuguguuugagccaucagaag

SEQ ID NO: 51053 - RNA, 18 nt, Artificial Sequence
  Synthetic oligonucleotide: TRBC-1071
gcugauggccaugguaag

SEQ ID NO: 51054 - RNA, 19 nt, Artificial Sequence
  Synthetic oligonucleotide: TRBC-1072
ugcugauggccaugguaag

SEQ ID NO: 51055 - RNA, 20 nt, Artificial Sequence
  Synthetic oligonucleotide: TRBC-1073
gugcugauggccaugguaag

SEQ ID NO: 51056 - RNA, 21 nt, Artificial Sequence
  Synthetic oligonucleotide: TRBC-1074
cgugcugauggccaugguaag

SEQ ID NO: 51057 - RNA, 22 nt, Artificial Sequence
  Synthetic oligonucleotide: TRBC-1075
ucgugcugauggccaugguaag

SEQ ID NO: 51058 - RNA, 23 nt, Artificial Sequence
  Synthetic oligonucleotide: TRBC-1076
cucgugcugauggccaugguaag

SEQ ID NO: 51059 - RNA, 24 nt, Artificial Sequence
  Synthetic oligonucleotide: TRBC-1077
ccucgugcugauggccaugguaag

SEQ ID NO: 51060 - RNA, 18 nt, Artificial Sequence
  Synthetic oligonucleotide: TRBC-1078
uaccccgaccacguggag

SEQ ID NO: 51061 - RNA, 19 nt, Artificial Sequence
  Synthetic oligonucleotide: TRBC-1079
cuaccccgaccacguggag

SEQ ID NO: 51062 - RNA, 20 nt, Artificial Sequence
  Synthetic oligonucleotide: TRBC-1080
ucuaccccgaccacguggag

SEQ ID NO: 51063 - RNA, 21 nt, Artificial Sequence
  Synthetic oligonucleotide: TRBC-1081
uucuaccccgaccacguggag

SEQ ID NO: 51064 - RNA, 22 nt, Artificial Sequence
  Synthetic oligonucleotide: TRBC-1082
cuucuaccccgaccacguggag

SEQ ID NO: 51065 - RNA, 23 nt, Artificial Sequence
  Synthetic oligonucleotide: TRBC-1083
gcuucuaccccgaccacguggag

SEQ ID NO: 51066 - RNA, 24 nt, Artificial Sequence
  Synthetic oligonucleotide: TRBC-1084
ggcuucuaccccgaccacguggag

SEQ ID NO: 51067 - RNA, 18 nt, Artificial Sequence
  Synthetic oligonucleotide: TRBC-1085
ugggguagagcaggugag

SEQ ID NO: 51068 - RNA, 19 nt, Artificial Sequence
  Synthetic oligonucleotide: TRBC-1086
cugggguagagcaggugag

SEQ ID NO: 51069 - RNA, 20 nt, Artificial Sequence
  Synthetic oligonucleotide: TRBC-243
ccugggguagagcaggugag

SEQ ID NO: 51070 - RNA, 21 nt, Artificial Sequence
  Synthetic oligonucleotide: TRBC-1087
gccugggguagagcaggugag

SEQ ID NO: 51071 - RNA, 22 nt, Artificial Sequence
  Synthetic oligonucleotide: TRBC-1088
ggccugggguagagcaggugag

SEQ ID NO: 51072 - RNA, 23 nt, Artificial Sequence
  Synthetic oligonucleotide: TRBC-1089
aggccugggguagagcaggugag

SEQ ID NO: 51073 - RNA, 24 nt, Artificial Sequence
  Synthetic oligonucleotide: TRBC-1090
gaggccugggguagagcaggugag

SEQ ID NO: 51074 - RNA, 18 nt, Artificial Sequence
  Synthetic oligonucleotide: TRBC-1091
gcuucuaccccgaccacg

SEQ ID NO: 51075 - RNA, 19 nt, Artificial Sequence
  Synthetic oligonucleotide: TRBC-1092
ggcuucuaccccgaccacg

SEQ ID NO: 51076 - RNA, 20 nt, Artificial Sequence
  Synthetic oligonucleotide: TRBC-38
aggcuucuaccccgaccacg

SEQ ID NO: 51077 - RNA, 21 nt, Artificial Sequence
  Synthetic oligonucleotide: TRBC-1093
caggcuucuaccccgaccacg

SEQ ID NO: 51078 - RNA, 22 nt, Artificial Sequence
  Synthetic oligonucleotide: TRBC-1094
acaggcuucuaccccgaccacg

SEQ ID NO: 51079 - RNA, 23 nt, Artificial Sequence
  Synthetic oligonucleotide: TRBC-1095
cacaggcuucuaccccgaccacg

SEQ ID NO: 51080 - RNA, 24 nt, Artificial Sequence
  Synthetic oligonucleotide: TRBC-1096
ccacaggcuucuaccccgaccacg

SEQ ID NO: 51081 - RNA, 18 nt, Artificial Sequence
  Synthetic oligonucleotide: TRBC-1097
ucacccagaucgucagcg

SEQ ID NO: 51082 - RNA, 19 nt, Artificial Sequence
  Synthetic oligonucleotide: TRBC-1098
gucacccagaucgucagcg

SEQ ID NO: 51083 - RNA, 20 nt, Artificial Sequence
  Synthetic oligonucleotide: TRBC-1099
ugucacccagaucgucagcg

SEQ ID NO: 51084 - RNA, 21 nt, Artificial Sequence
  Synthetic oligonucleotide: TRBC-1100
cugucacccagaucgucagcg

SEQ ID NO: 51085 - RNA, 22 nt, Artificial Sequence
  Synthetic oligonucleotide: TRBC-1101
ccugucacccagaucgucagcg

SEQ ID NO: 51086 - RNA, 23 nt, Artificial Sequence
  Synthetic oligonucleotide: TRBC-1102
accugucacccagaucgucagcg

SEQ ID NO: 51087 - RNA, 24 nt, Artificial Sequence
  Synthetic oligonucleotide: TRBC-1103
aaccugucacccagaucgucagcg

SEQ ID NO: 51088 - RNA, 18 nt, Artificial Sequence
  Synthetic oligonucleotide: TRBC-1104
cugauggccaugguaagg

SEQ ID NO: 51089 - RNA, 19 nt, Artificial Sequence
  Synthetic oligonucleotide: TRBC-1105
gcugauggccaugguaagg

SEQ ID NO: 51090 - RNA, 20 nt, Artificial Sequence
  Synthetic oligonucleotide: TRBC-248
ugcugauggccaugguaagg

SEQ ID NO: 51091 - RNA, 21 nt, Artificial Sequence
  Synthetic oligonucleotide: TRBC-1106
gugcugauggccaugguaagg

SEQ ID NO: 51092 - RNA, 22 nt, Artificial Sequence
  Synthetic oligonucleotide: TRBC-1107
cgugcugauggccaugguaagg

SEQ ID NO: 51093 - RNA, 23 nt, Artificial Sequence
  Synthetic oligonucleotide: TRBC-1108
ucgugcugauggccaugguaagg

SEQ ID NO: 51094 - RNA, 24 nt, Artificial Sequence
  Synthetic oligonucleotide: TRBC-1109
cucgugcugauggccaugguaagg

SEQ ID NO: 51095 - RNA, 18 nt, Artificial Sequence
  Synthetic oligonucleotide: TRBC-1110
gccaugguaaggaggagg

SEQ ID NO: 51096 - RNA, 19 nt, Artificial Sequence
  Synthetic oligonucleotide: TRBC-1111
ggccaugguaaggaggagg

SEQ ID NO: 51097 - RNA, 20 nt, Artificial Sequence
  Synthetic oligonucleotide: TRBC-1112
uggccaugguaaggaggagg

SEQ ID NO: 51098 - RNA, 21 nt, Artificial Sequence
  Synthetic oligonucleotide: TRBC-1113
auggccaugguaaggaggagg

SEQ ID NO: 51099 - RNA, 22 nt, Artificial Sequence
  Synthetic oligonucleotide: TRBC-1114
gauggccaugguaaggaggagg

SEQ ID NO: 51100 - RNA, 23 nt, Artificial Sequence
  Synthetic oligonucleotide: TRBC-1115
ugauggccaugguaaggaggagg

SEQ ID NO: 51101 - RNA, 24 nt, Artificial Sequence
  Synthetic oligonucleotide: TRBC-1116
cugauggccaugguaaggaggagg

SEQ ID NO: 51102 - RNA, 18 nt, Artificial Sequence
  Synthetic oligonucleotide: TRBC-1117
cagcgccgaggccugggg

SEQ ID NO: 51103 - RNA, 19 nt, Artificial Sequence
  Synthetic oligonucleotide: TRBC-1118
ucagcgccgaggccugggg

SEQ ID NO: 51104 - RNA, 20 nt, Artificial Sequence
  Synthetic oligonucleotide: TRBC-1119
gucagcgccgaggccugggg

SEQ ID NO: 51105 - RNA, 21 nt, Artificial Sequence
  Synthetic oligonucleotide: TRBC-1120
cgucagcgccgaggccugggg

SEQ ID NO: 51106 - RNA, 22 nt, Artificial Sequence
  Synthetic oligonucleotide: TRBC-1121
ucgucagcgccgaggccugggg

SEQ ID NO: 51107 - RNA, 23 nt, Artificial Sequence
  Synthetic oligonucleotide: TRBC-1122
aucgucagcgccgaggccugggg

SEQ ID NO: 51108 - RNA, 24 nt, Artificial Sequence
  Synthetic oligonucleotide: TRBC-1123
gaucgucagcgccgaggccugggg

SEQ ID NO: 51109 - RNA, 18 nt, Artificial Sequence
  Synthetic oligonucleotide: TRBC-1124
agcuggugggugaauggg

SEQ ID NO: 51110 - RNA, 19 nt, Artificial Sequence
  Synthetic oligonucleotide: TRBC-1125
gagcuggugggugaauggg

SEQ ID NO: 51111 - RNA, 20 nt, Artificial Sequence
  Synthetic oligonucleotide: TRBC-1126
ugagcuggugggugaauggg

SEQ ID NO: 51112 - RNA, 21 nt, Artificial Sequence
  Synthetic oligonucleotide: TRBC-1127
cugagcuggugggugaauggg

SEQ ID NO: 51113 - RNA, 22 nt, Artificial Sequence
  Synthetic oligonucleotide: TRBC-1128
gcugagcuggugggugaauggg

SEQ ID NO: 51114 - RNA, 23 nt, Artificial Sequence
  Synthetic oligonucleotide: TRBC-1129
agcugagcuggugggugaauggg

SEQ ID NO: 51115 - RNA, 24 nt, Artificial Sequence
  Synthetic oligonucleotide: TRBC-1130
gagcugagcuggugggugaauggg

SEQ ID NO: 51116 - RNA, 18 nt, Artificial Sequence
  Synthetic oligonucleotide: TRBC-1131
gucucggccaccuucugg

SEQ ID NO: 51117 - RNA, 19 nt, Artificial Sequence
  Synthetic oligonucleotide: TRBC-1132
ggucucggccaccuucugg

SEQ ID NO: 51118 - RNA, 20 nt, Artificial Sequence
  Synthetic oligonucleotide: TRBC-1133
gggucucggccaccuucugg

SEQ ID NO: 51119 - RNA, 21 nt, Artificial Sequence
  Synthetic oligonucleotide: TRBC-1134
agggucucggccaccuucugg

SEQ ID NO: 51120 - RNA, 22 nt, Artificial Sequence
  Synthetic oligonucleotide: TRBC-1135
gagggucucggccaccuucugg

SEQ ID NO: 51121 - RNA, 23 nt, Artificial Sequence
  Synthetic oligonucleotide: TRBC-1136
ugagggucucggccaccuucugg

SEQ ID NO: 51122 - RNA, 24 nt, Artificial Sequence
  Synthetic oligonucleotide: TRBC-1137
cugagggucucggccaccuucugg

SEQ ID NO: 51123 - RNA, 18 nt, Artificial Sequence
  Synthetic oligonucleotide: TRBC-1138
gcaggugaguggggccug

SEQ ID NO: 51124 - RNA, 19 nt, Artificial Sequence
  Synthetic oligonucleotide: TRBC-1139
agcaggugaguggggccug

SEQ ID NO: 51125 - RNA, 20 nt, Artificial Sequence
  Synthetic oligonucleotide: TRBC-261
gagcaggugaguggggccug

SEQ ID NO: 51126 - RNA, 21 nt, Artificial Sequence
  Synthetic oligonucleotide: TRBC-1140
agagcaggugaguggggccug

SEQ ID NO: 51127 - RNA, 22 nt, Artificial Sequence
  Synthetic oligonucleotide: TRBC-1141
uagagcaggugaguggggccug

SEQ ID NO: 51128 - RNA, 23 nt, Artificial Sequence
  Synthetic oligonucleotide: TRBC-1142
guagagcaggugaguggggccug

SEQ ID NO: 51129 - RNA, 24 nt, Artificial Sequence
  Synthetic oligonucleotide: TRBC-1143
gguagagcaggugaguggggccug

SEQ ID NO: 51130 - RNA, 18 nt, Artificial Sequence
  Synthetic oligonucleotide: TRBC-1144
cugagcuggugggugaau

SEQ ID NO: 51131 - RNA, 19 nt, Artificial Sequence
  Synthetic oligonucleotide: TRBC-1145
gcugagcuggugggugaau

SEQ ID NO: 51132 - RNA, 20 nt, Artificial Sequence
  Synthetic oligonucleotide: TRBC-269
agcugagcuggugggugaau

SEQ ID NO: 51133 - RNA, 21 nt, Artificial Sequence
  Synthetic oligonucleotide: TRBC-1146
gagcugagcuggugggugaau

SEQ ID NO: 51134 - RNA, 22 nt, Artificial Sequence
  Synthetic oligonucleotide: TRBC-1147
ggagcugagcuggugggugaau

SEQ ID NO: 51135 - RNA, 23 nt, Artificial Sequence
  Synthetic oligonucleotide: TRBC-1148
uggagcugagcuggugggugaau

SEQ ID NO: 51136 - RNA, 24 nt, Artificial Sequence
  Synthetic oligonucleotide: TRBC-1149
guggagcugagcuggugggugaau

SEQ ID NO: 51137 - RNA, 18 nt, Artificial Sequence
  Synthetic oligonucleotide: TRBC-1150
ucgcuguguuugagccau

SEQ ID NO: 51138 - RNA, 19 nt, Artificial Sequence
  Synthetic oligonucleotide: TRBC-1151
gucgcuguguuugagccau

SEQ ID NO: 51139 - RNA, 20 nt, Artificial Sequence
  Synthetic oligonucleotide: TRBC-1152
ggucgcuguguuugagccau

SEQ ID NO: 51140 - RNA, 21 nt, Artificial Sequence
  Synthetic oligonucleotide: TRBC-1153
aggucgcuguguuugagccau

SEQ ID NO: 51141 - RNA, 22 nt, Artificial Sequence
  Synthetic oligonucleotide: TRBC-1154
gaggucgcuguguuugagccau

SEQ ID NO: 51142 - RNA, 23 nt, Artificial Sequence
  Synthetic oligonucleotide: TRBC-1155
cgaggucgcuguguuugagccau

SEQ ID NO: 51143 - RNA, 24 nt, Artificial Sequence
  Synthetic oligonucleotide: TRBC-1156
ccgaggucgcuguguuugagccau

SEQ ID NO: 51144 - RNA, 18 nt, Artificial Sequence
  Synthetic oligonucleotide: TRBC-1157
agcaggugaguggggccu

SEQ ID NO: 51145 - RNA, 19 nt, Artificial Sequence
  Synthetic oligonucleotide: TRBC-1158
gagcaggugaguggggccu

SEQ ID NO: 51146 - RNA, 20 nt, Artificial Sequence
  Synthetic oligonucleotide: TRBC-275
agagcaggugaguggggccu

SEQ ID NO: 51147 - RNA, 21 nt, Artificial Sequence
  Synthetic oligonucleotide: TRBC-1159
uagagcaggugaguggggccu

SEQ ID NO: 51148 - RNA, 22 nt, Artificial Sequence
  Synthetic oligonucleotide: TRBC-1160
guagagcaggugaguggggccu

SEQ ID NO: 51149 - RNA, 23 nt, Artificial Sequence
  Synthetic oligonucleotide: TRBC-1161
gguagagcaggugaguggggccu

SEQ ID NO: 51150 - RNA, 24 nt, Artificial Sequence
  Synthetic oligonucleotide: TRBC-1162
ggguagagcaggugaguggggccu

SEQ ID NO: 51151 - RNA, 18 nt, Artificial Sequence
  Synthetic oligonucleotide: TRBC-1163
ccucuaugagaucuugcu

SEQ ID NO: 51152 - RNA, 19 nt, Artificial Sequence
  Synthetic oligonucleotide: TRBC-1164
uccucuaugagaucuugcu

SEQ ID NO: 51153 - RNA, 20 nt, Artificial Sequence
  Synthetic oligonucleotide: TRBC-278
auccucuaugagaucuugcu

SEQ ID NO: 51154 - RNA, 21 nt, Artificial Sequence
  Synthetic oligonucleotide: TRBC-1165
cauccucuaugagaucuugcu

SEQ ID NO: 51155 - RNA, 22 nt, Artificial Sequence
  Synthetic oligonucleotide: TRBC-1166
ccauccucuaugagaucuugcu

SEQ ID NO: 51156 - RNA, 23 nt, Artificial Sequence
  Synthetic oligonucleotide: TRBC-1167
accauccucuaugagaucuugcu

SEQ ID NO: 51157 - RNA, 24 nt, Artificial Sequence
  Synthetic oligonucleotide: TRBC-1168
caccauccucuaugagaucuugcu

SEQ ID NO: 51158 - RNA, 18 nt, Artificial Sequence
  Synthetic oligonucleotide: TRBC-1169
ugucugccaccauccucu

SEQ ID NO: 51159 - RNA, 19 nt, Artificial Sequence
  Synthetic oligonucleotide: TRBC-1170
cugucugccaccauccucu

SEQ ID NO: 51160 - RNA, 20 nt, Artificial Sequence
  Synthetic oligonucleotide: TRBC-1171
ccugucugccaccauccucu

SEQ ID NO: 51161 - RNA, 21 nt, Artificial Sequence
  Synthetic oligonucleotide: TRBC-1172
uccugucugccaccauccucu

SEQ ID NO: 51162 - RNA, 22 nt, Artificial Sequence
  Synthetic oligonucleotide: TRBC-1173
guccugucugccaccauccucu

SEQ ID NO: 51163 - RNA, 23 nt, Artificial Sequence
  Synthetic oligonucleotide: TRBC-1174
gguccugucugccaccauccucu

SEQ ID NO: 51164 - RNA, 24 nt, Artificial Sequence
  Synthetic oligonucleotide: TRBC-1175
ggguccugucugccaccauccucu

SEQ ID NO: 51165 - RNA, 18 nt, Artificial Sequence
  Synthetic oligonucleotide: TRBC-1176
uccaguucuacgggcucu

SEQ ID NO: 51166 - RNA, 19 nt, Artificial Sequence
  Synthetic oligonucleotide: TRBC-1177
guccaguucuacgggcucu

SEQ ID NO: 51167 - RNA, 20 nt, Artificial Sequence
  Synthetic oligonucleotide: TRBC-51
aguccaguucuacgggcucu

SEQ ID NO: 51168 - RNA, 21 nt, Artificial Sequence
  Synthetic oligonucleotide: TRBC-1178
aaguccaguucuacgggcucu

SEQ ID NO: 51169 - RNA, 22 nt, Artificial Sequence
  Synthetic oligonucleotide: TRBC-1179
caaguccaguucuacgggcucu

SEQ ID NO: 51170 - RNA, 23 nt, Artificial Sequence
  Synthetic oligonucleotide: TRBC-1180
ucaaguccaguucuacgggcucu

SEQ ID NO: 51171 - RNA, 24 nt, Artificial Sequence
  Synthetic oligonucleotide: TRBC-1181
gucaaguccaguucuacgggcucu

SEQ ID NO: 51172 - RNA, 18 nt, Artificial Sequence
  Synthetic oligonucleotide: TRBC-1182
gcugucaaguccaguucu

SEQ ID NO: 51173 - RNA, 19 nt, Artificial Sequence
  Synthetic oligonucleotide: TRBC-1183
cgcugucaaguccaguucu

SEQ ID NO: 51174 - RNA, 20 nt, Artificial Sequence
  Synthetic oligonucleotide: TRBC-1184
ccgcugucaaguccaguucu

SEQ ID NO: 51175 - RNA, 21 nt, Artificial Sequence
  Synthetic oligonucleotide: TRBC-1185
uccgcugucaaguccaguucu

SEQ ID NO: 51176 - RNA, 22 nt, Artificial Sequence
  Synthetic oligonucleotide: TRBC-1186
uuccgcugucaaguccaguucu

SEQ ID NO: 51177 - RNA, 23 nt, Artificial Sequence
  Synthetic oligonucleotide: TRBC-1187
cuuccgcugucaaguccaguucu

SEQ ID NO: 51178 - RNA, 24 nt, Artificial Sequence
  Synthetic oligonucleotide: TRBC-1188
acuuccgcugucaaguccaguucu

SEQ ID NO: 51179 - RNA, 18 nt, Artificial Sequence
  Synthetic oligonucleotide: TRBC-1189
cgugcugauggccauggu

SEQ ID NO: 51180 - RNA, 19 nt, Artificial Sequence
  Synthetic oligonucleotide: TRBC-1190
ucgugcugauggccauggu

SEQ ID NO: 51181 - RNA, 20 nt, Artificial Sequence
  Synthetic oligonucleotide: TRBC-1191
cucgugcugauggccauggu

SEQ ID NO: 51182 - RNA, 21 nt, Artificial Sequence
  Synthetic oligonucleotide: TRBC-1192
ccucgugcugauggccauggu

SEQ ID NO: 51183 - RNA, 22 nt, Artificial Sequence
  Synthetic oligonucleotide: TRBC-1193
cccucgugcugauggccauggu

SEQ ID NO: 51184 - RNA, 23 nt, Artificial Sequence
  Synthetic oligonucleotide: TRBC-1194
gcccucgugcugauggccauggu

SEQ ID NO: 51185 - RNA, 24 nt, Artificial Sequence
  Synthetic oligonucleotide: TRBC-1195
ugcccucgugcugauggccauggu

SEQ ID NO: 51186 - RNA, 18 nt, Artificial Sequence
  Synthetic oligonucleotide: TRBC-1196
cacccgaggucgcugugu

SEQ ID NO: 51187 - RNA, 19 nt, Artificial Sequence
  Synthetic oligonucleotide: TRBC-1197
ccacccgaggucgcugugu

SEQ ID NO: 51188 - RNA, 20 nt, Artificial Sequence
  Synthetic oligonucleotide: TRBC-1198
cccacccgaggucgcugugu

SEQ ID NO: 51189 - RNA, 21 nt, Artificial Sequence
  Synthetic oligonucleotide: TRBC-1199
ucccacccgaggucgcugugu

SEQ ID NO: 51190 - RNA, 22 nt, Artificial Sequence
  Synthetic oligonucleotide: TRBC-1200
uucccacccgaggucgcugugu

SEQ ID NO: 51191 - RNA, 23 nt, Artificial Sequence
  Synthetic oligonucleotide: TRBC-1201
guucccacccgaggucgcugugu

SEQ ID NO: 51192 - RNA, 24 nt, Artificial Sequence
  Synthetic oligonucleotide: TRBC-1202
uguucccacccgaggucgcugugu

SEQ ID NO: 51193 - RNA, 17 nt, Artificial Sequence
  Synthetic oligonucleotide: TRBC-1203
ccuguuuucuuucagac

SEQ ID NO: 51194 - RNA, 17 nt, Artificial Sequence
  Synthetic oligonucleotide: TRBC-1204
cacuggugugccuggcc

SEQ ID NO: 51195 - RNA, 17 nt, Artificial Sequence
  Synthetic oligonucleotide: TRBC-1205
cuuccacaggucaagag

SEQ ID NO: 51196 - RNA, 20 nt, Artificial Sequence
  Synthetic oligonucleotide: TRBC-1206
ccacacuggugugccuggcc

SEQ ID NO: 51197 - RNA, 20 nt, Artificial Sequence
  Synthetic oligonucleotide: TRBC-1207
ucucuuccacaggucaagag

SEQ ID NO: 51198 - RNA, 20 nt, Artificial Sequence
  Synthetic oligonucleotide: TRBC-1208
gccuuuugggugugggagau

SEQ ID NO: 51199 - RNA, 17 nt, Artificial Sequence
  Synthetic oligonucleotide: TRBC-1209
uuuugggugugggagau

SEQ ID NO: 51200 - RNA, 20 nt, Artificial Sequence
  Synthetic oligonucleotide: TRBC-1210
uccccuguuuucuuucagac

SEQ ID NO: 51201 - RNA, 20 nt, Artificial Sequence
  Synthetic oligonucleotide: AAVS1
guccccuccaccccacagug
